United States Patent Application Publication US 2008/0274467 A1 - sequence listing, part 3

SEQ ID NO: 234 - DNA, 391811 bp, Homo sapiens
tgtatttatattaaaagataaagaaccaaatcattggtattagaagactgtgaactaaaatagatggttttagctatttataaagaggcttcatccctgagaggtctgagaaggaaaaaagaaagacaatgccagggtacaatgtaacttcctttgattgtttttttttcttcaaagtttatcgctagtacgattaaaagtagtaaatctttctctaaagcaatgtagagaaaaacaaaaacaaacaacaaaacaaaaaagtagtgaagttattgaagtgctaaaaatgaaaatgcttatattatgagctatttataacagaacttaattgaaaccacatgagtgagagacctaatttcaggtctgactgaaagaaactctatactcaaggtttgctgaagtagggaatgtataatatgtataatcagtcctacactatttaatacattaccttatccccccccaaaaaaccttctttagctaatactatctgtaggatttttaaaaatttggtaatataacttgcagtatctcaacaattcccttcttaaaaagcaatgatcctgtacagtgaacagagtccagttgtataacttggagagattttaacttgattagtccttgatgctaaagggctttactaatattatacattcataagagtcagattttcaaaacttcaggattaagaaagattgtaacatctatgagttattttgcagttaaataatctgtatagtatttatttttaacaaggcatccctatgaaggtactcttataatgatttgacaaggctttaagccactaacaaagctatttgtgattttgtgatttcatctgaagatgaaatatggaaaagttgtgaagaaacatagatgagaacgttaacgatggagactagcataaaatttagacctgtattctaaattaatactcaactaagtcagcaactcttgtggtggttttaaaagaagaaatgtgataagcagtggggaagtaaggaatgaaatagaagccctcttctctgccttcaagcagtttatatttcaagtgggatgtgagagaatgagaatgaattatttgctagtttctaatcaggtgataggttcctgtgagaaggaaagatacttgattcttggattgggcctggtggggtggaagaaataaacatttgatggtttcacattgctgatgaagaaaatataggtagctctgagaggtaaatgtttggccagggctatgtaatttaggaagtgatggagccaagatacggggcaggagtatttgaatataatatttttttccttctccccagaaaaggcacattcaatgtttttgttttatagactgcagcacaaggaaaggtcagagggaggaaggaattggaattggcattggcattcaaggcttaggagtggaggatataacaacttcaattatgattaagagcaaggaatggctgggtgcggtggctcacccctgtaatcccagcactttgggaggccgaggcaggcggatcacgaggtcaggagattgagaccatcctggctaacacggtgaaaccccgcctctactaaaaataccaaaaattagccaggcatggtggcgggcacctgtagtccccgctacttgggaggctgaggcgagagaatggcatgaacccgggaggcagagctggcagtgagccgagaccacgccactgcactccagcctgggtgacagagcaagactctgtctcaaagaaaaaaaaaaaaaaaaaaagtaaagcagaagaagcctgctggctggtgacatgagaagtccaaagaggaatcctattggcaagtccttggaaaaggttgtatgcgtaatctttacatctgttccaggcctcagaggtctttcagtgaatctccctggaagaatatgaaaaaaggaattcatctctttctgggatgagggattcatagtttttatctattttcagtgtagtctgcgatctaaaaaaggttaatgaaacaacctttttacttcagcatgtaactaaactttatttttaagcatttaaaattatatcttaaaattttatctcattaaaaacaaatctcaggtcataagtacctcaaaagttcagttaaaagtgcatgaaagagccaggcacagtggctcatgcctataatcccagcactttgggaggctgaagcaagcagatcacttgagcccaggagtttgagaccaggttgggcaacgtagggagactccatctctacaaaaaaagtacaaaaattagctgggagtggtggtgcttgcctgtagtctcagctactcgggagtctgaggtaggaaaattgcttgagcccaggaggcagggctgcagtgagccatggtcgtgccactgcactcctgcctgggtgacagagcaagaccctatctcaaaaaaaaaaaaaaaaaaaaaaagtacatgaaagttgatgtcatttccatttttaactagaattttttttcccacctctccaagatatcattcatcatggtttgttcagtaatgaatagccttttatgttgtgtatatagcatatatgtttatataaaggtgtgatgcccaaactttccagataagttatcttcaacctctcctgctctactcttattttctaaccagaattttaaaatgtttcatcatcttacatgttaaatcctaccttgactccatatgtttttctagctagcctatcattcttcatccgtttgtattcatgtttcctaaagagcgtgctttctactttgtcacagacccctcacctttcacccttcctaaacatacccaaacacacataatttggccttagctttgtttctccgctgacattgttccccttaaggctcccagcaacctccttgatgctaatctaaggggtatttttcagttctcatcttacccaacttcttccagctaatgatgttatagactagtactttcttcctaaaagcctccagaaaagaatgacttctctgaaacattaccctccaggctttcatctcatctttagctcactcttttccatttcttacaaaggctcctttttttctgcccaatctttaagttttggtgtttcctggggttctgttctggggcatcttctcatgcaacacttgcactgggtgatctcatatactcatggcttagttaccatctctgtgcagctgaccccaagtttttgtctctgttatggatattggtagtggacatgtgtggtgacttcccctgcatctatccattgcctttctaactttatcctaagtggattttacatttctcagccatatggtttaggtgggattgatcccacccatagttccaggggtaggcctttaatggcataagccaatgcatgttagccttctcaactctggcacagtaattggttcagtgatgggtccaatgcctaaaatgatcctattgggattaaatatcagagtttttttcttggaatgctgggacagacttttctttttctcttggactttcatctgaaaggatatatcctggaagctgctggcagccagcttatgtccatgtttggaaacactgcctggaatagagtctgcacagagaaattagagatgagaagaagaaactgaattctcgataccattgatgcagtccttggataaagctgtgcctgaactgttcatctacactagatccagttatgagagctaatcaatttcattctttgcttacgctagttttgtttgggttttctatcatgtgcaatgtagaacatcctgactaatggactcaatcaaaatctttctagagtttcccgcatcatagcatttatcaaaatgtactataattgcctgtccattttttatttttattttgtattttttgtgacagagccttgctctttgtcacccaggctggagtgcagtggcacaatctcggatcactgcaacctccgcctcctgggttaaagcgattctcttgcctcaatgtcctgagtagtagcttggactactactgctggtagctgtgcaccatcatgcctggctaatttttgtatttttagtacagacaagggttttgccatgttggccaggcacgtcttcaactcctgacctcaagtgatccacctgccttgacctcccaaagtgttgggattaacaagcgtgagccactgcacccagcctgtcaattgtttttttctccctagactgtaaggtccttgatgcagaaactatgtcttgttctttattgtattgctcgattctagcacagatacatattaagcatattaaatgtttggaaaatattttttgaaataatttttgtcatagttttgtgcacttataatagaattcaagatgaggatttcaagccaatttatatttgaaggaaaagtttgattccctgaaataacttatgacaatctgtaatagcttttttgttatttagtttcttaagggcagggcctgtacccatcttgttcatattgtattcctagcacttggaacatagtaggtgcttattttcaccatccctattaggttgtttctgttgcatacaaaattctctactatcttccatcttaaaacaaaagaaaaccaattttccctttccatctcctctctgctccccatctcagcaaaaaaagaggagttgtctgcatttgctttaccacttccattttgccccctttatcttttggaaactgcttcaggctttcactcacattactccattgaaactgttcttgtgaagatacccatattgacaaatctaatgaacacttgaattttcagcatcattcaacacagttgactcatttctttttagagacattttcttctcttgtcttactgctgctccttctcattcttctatgttggatctttctcttccagacctgtaagtgttatcctctttgggtcttagttctgaaccctcttttttatatatacactcccttcacgtaaagtcatccattccattattttaaattctgtcagccgggcgcggtggctcacgcctgtaatcctggcactttgggaggcagaggtgggcggatcacgaggtcaggagatcgagaccatcctggctaacacagtgaaactccatctctactaaaaatacaaaaaaaaaaaaaaaaattagctaggcatggtggtgggcgcctgtagtcccagctactggggaggctgaggcaggagaatggtgttaacctgggaggcagagcttgcagtgagccaagatcgtgccactgtactccagcctgggagacagagtgagactctgtctcaaaaaaaataaataaaaataaattctgtctagaagctgatgcctcccaaatttctctcactaatcctagcttctccccatatattctagtcagtatctccacatggatgtcttataggcaattcaaacttaatacatccaaacttaatatgcttggttttcctcttaaaatccatgtgttccctggtcttttaatcaggaaataacttccactaagttgctcacagcagaaacgtaggagtcatctttttctttccttcattcctattagaagtgtgtatctccaaaataacttgctcgccaccatcaattctctcctaaagtacaagtagtcacctatttcatctctgattccattcttcctcttttaaaattccttctccacagaacagccacagtagaatcataaattgtgttatgtccctctcctatttcaaacccctctgatagcttccatcacactcagtctaacctcctttccataatttacaaggtcctacataatctggccccttgtacctttctaaccatttcaaaccatctcccattctcagagtatattttagttcttctggcttcctttctcctcttcaaacaggccaaaaccatttctctcttagaggctttgtactttttcttctctttgccagaatgttcttcaccaccttcttcctatagctggttccttttcattctttacatcttagctaaaatcacgcatctttggataggccttccctgaccaccctatctaaatttggtctccatcagttgcttgctatccatgctttctttcctggctcctagcacaccttgcaaacatcttgtttattttgtctcttcccacaaaaaactaagtttctaagaataaggactctcttgttcagtaccatattcccagtgcctacagtagagtctgagatgttggagggactcaagaaatgtttgttgaataaatcactgtttatgttttctggtgcttcagaatactgccatttccttattatatagcaataaatggtcagttggtttaggagtttttaaaagtggggtaacttgagcccatttaatgtttttcgggcaggtctacttgatcatcttgattttgaatgtcttgttctgagatgtcatcaatgaaattataatttgtttcatgataattcagcataattgagactatacttattagcatgatggttgaggaagattttagttttattgccaccttttcctatatgtagtaaccaggaaatgcctatagcaaagagtgcctgtcttttatgctatcaggaggggaatctttgaagcaggtggacagaaatctatagactgttggagttttgaggagactaaatcttccacccttgagtgagagtgtagtaggccttatgtctaatctttgtaacccagtagttccacattgatataacgtagcatgaatgagtaggtaattattttctttctcacatttcctctttgctgactccttaaacttacaaaggctgcctgtaagacacctcagcttctctgtgataggatgtagtactaagtaaaaggaaaaataaaagataatattcactgatactaaaattgaaatatttaaattttaatctgaataattatgtatagttttgtcctcttttattacaaacttgtatcatttcagcgctctctgattctgtgactttagtattacactgcaatgtaggagaaatgtgatcaataataggaagtaaatctagtttttctctgtacctttcaagactaaatgagactacagaaataaagctattacatgattagagaatactgaaagtgtctcttatgcaagcagttatattcttttcccttactattaatatctataattacccatgaagtaattttttcccaagacgaaagcacacaaggttattgtatttggaaagttccttctgaggggacctggaactacccttttctgtgccagtcatggacagccattagtccttagtgtctttggtcccgtatagacagactttggcctgtttccacttgtactcatttagtgtaacttaactagtgtaaaaacaaaacttcccaaatgattgccccattaattgactgataggatctacacttgtttactttttaaaaattgcattgactttatttttttgtttacaaaaacttcatttttcattctacattcaaatgttttgtgagaaaaatatacacagctcattttaccctgttagaaatctttcagcatttgatgccagaggattatctgaaatgtctaggtgaaatagtactgctgttttgatcctgtattgcccagtagtttctggaccttgggtaatacacagagcaactgaatgattttcaacctaagcacctcaaatgttacctcctcagactttgctgacaccctcatttcattgcttatttcttactaactccacaacattagttactatctgaaataactttatatacttatttactgtctcctcacctagaaagttagctcttttgtactttggatccccactgcctagaacgtaaatgattgtggaaagaatatgttaatatcttaatcatcaataaatagtgcaataactttaaatacttatttactgtctcctcacctagaaagttagctcttttttactttggatccccactgcctagaacataaatgattgtggaaagaatatgttactatcttaatcatcaataaatagtgctttaaaaaagtcttggaacattgaaactcagtattttggttgttgacaaattctcaaagagatataaattctgcctattactttttcttttctaaatatcttcagacccttatttagagcataaactctagctgcaaatcagtgggagttggtagccacttaaagaaaataaaatttaatttgtatacctaattaaatgaaattctcaaaaagtatttgttttttgagatagggcccccctctgttgcccaggctgaagtacaagtggcactcactgcagcgttgacttcccacactcaagctaccctcccacctcagccacccgagtgggaccacaggtgtgcgccgtgaccacacctggctaatttttgtttgtttttgagacggtgtctcgctcttgttgcccgggctggagtgcaatggcacaatctcggctcactgcaacctctgcctcctgggttcaagcaattctcctgtcccagcctcccaggtagttgggattacaggcattcgccgccaccacgccggctaattttttggagacggggtttcaccatgctggtcaggctggtcttgaactcgtgacctcaggtgatccactcgcttcggcctcccaaagtgctgggataacaggcgtgagccacagcgcccggccacacctggctaattaaaatttttttttttttttttttttgtagagacagggtcttactgttgcccaagctggtttcgaactacagagctaaagcgatctgcctgcctcggccttgcagtgttgcgattacagacgtgagctaccatgcctgcccaaagtatttttatccagccttccaaccatatacaagttatttcctaaatttctctgaggattacatcccattgtacgagcttcctcatcctggagggggagtgagtgaatggatggggttgctgaaaatttataagattagtttgatacaaactctgatatattttggttccatgggttaaataagactgtgaggtcacatgtgagcaatgtttttctttttttagaaagcgtttcttccctgtaacttgactaaaattccacagttcctcccgtcttcatacctaaacattaagatagatttattaaaaatctaaataattagcgtaaagggttagatatctgtacatatatgtctttaggcttcctgacttcgttggtttcacctgattttgttggttaacaaggaaacagcctaactcctgagcctccaatcgctagctcttccaagagactaattcccggtgtcagggttctaggcgctagtacaaactgcccgcagtgcctgctcgaggtcgtctttgcggggagccatggctgtggcaggggtcccggcagtttccttcaccagtccctgtgagccagcccccgcgctgtccagatcccagacctctcgcgggccggcgcagccttctaagggcggtcctggggtcctgggctcaaagtccagccttggccgcggccccacgggtacgcttgtgggccttccgtgctccaggagccgccagactctgcccggcgcggaatggaggtgtgaagccgcagaagctagggaggggctgacaaggaagagtcggttgcccgtggttccctacgcaactctgtgggtgcggggagtcgaagccttctgcactccaaggctcctggcatcgtccccgcgccaccccggcgtaccctctgatggtcgctgacagcttcacaggggaagatcgagactgacccttctcccgctacacatccctagccaccttccagtcctgtcctctcggctcacgccccgcccctgccacgtgacgggacccgccagtgagcctatgggaggcagctccgccccacgcccccaccttgccccttgctccgcgcgccgccacgtgatgcggcccccctccagccaatgagtgccggccttgcctcgcgccccgccccgcgcgccgtggccgtttgaagtgactaatttctgtcatatgactgaggcgcccatgggggtggcggggcggctgtaggagcaggggcctagcaagcgcccagcggagcgacccctgcctggccgtggctagcatggcccctacgctgttccagaagctcttcagcaagaggaccgggctgggcgcgcccggccgcgacgcccgggacccagattgcgggttcaggtagggcgctgtggggcgggggtcgcggagccgatggccttgtgggctccgggctccaggggtgttggggccttcggtgttccgacccgagcggaagcgccgcgccgagagcagcatctggtcctcggtggggtggagccggctgcgggctagcgccgaagggttggagcgaggtcctaccttttattttaccccacccgcctcgccgttgccccttccccctcctcccgtcggtttgtttacgacctgcccccagccacgcgcgactctgctcctccggacctagcaccgcggcctgagactttgggtccacacgccttcctggcaccgagtagagttgggcgcgggctggattggacctcagccgccgtactccgggccgcgaagttctcccctcctccccgtgaccagttgtcctccgggcgctgcgttccagctccgttggcgttgtggagagagcggcacgtttggccaagcttctgagttgagagaaggctggaggagcgagtaggcaacgtgccgttctttcaggtttcttggacgctaaaattggaggtgtgcagtaaccggaccgagcgaccttaatgttatcgaaggagaaatgtgaaacttgagtttagggttactgccgaaggaagaccaaattgaatgaaatctggccttggaattggctgtagattcttcctcctcgaattgttactgaaaaggagtcttaaaaattgaaaatgttagcagagcattttgtagtgttacaggctttgttaatttttcattgtagtacctgttgctggcagagtaacttttcagaattgtaagatttgatataaacctgaattcaaggtaaaatttagtcgttaaactgcacctgaggagattatgtccaaacagcctttatacgtattgcagtgtggaaacttgcaaatataactaggctaaatgtcaaatgccacacgttttaaacttggtaggatagcaaagagcccagttgtacaacaatagtagaaacaaaaaaataaaataaaaataaaaaaagagaatctgtcaaattttggaacaggcgaagttgccacactggtttaagaaattttgctattcttaaaattattcactctctcttgctaatgcaggtctcatcaggaaaaattcagtaaatgcatatggaattgaagaggtttttctacgtatctgtcttttcccctgaaaaataaatgtgtcatgctcatctgtctctctttaaacatttctttagtgtttttcctttgaaaaatgaaagtgcaggttagataatactacattgagccatctagtaactcaagcgacaataggaaacaggttccgataggatatttaaaaggtggcatttgaatagacaactgctttctatttctggacaaagattgactttgggtacgtaggtttacaaggctctcaagtcactcatatgaaaaaacattttcacgtctggttttcaaaaatgtaaagtctactatatagttgcgtaatactattttacagttaccaaagaactttctcatcagttatcttatttgatgtttcacagcaatcttacgagatagagcaagtagcagtgcagataactatatacttttgccagtggaagtaagaattatctgtaagcccaataactgcagtacattatggaatctctcactttaaaaataaaacttgtgcatgtgagaaatgaaaactgatgaaacagaataggcatatctgaaggaaaaaaaaccattctggttaatgtcacatagctaataacttacagatctaatcaacccagggttttttaaaaactatttcattgagctataatttatacacaataaagtataaatacattttaagcatacatcgtatacagttgtgtacccaccacccccatgaagttttagaacacttccatcacccaaaaagttccctcatgctctgttgtagcctaactcctcctcacccgtggcagtcactgatactttctgtcatagtcttgtgtctgtcttgtttgttgcatttattagttcctttttttctcactctgtcaacaggctgtagtacagtggcgtgaccacgcttaatacactgtcaacctcctgggctcaagggatcctctcaccttggcctcccaaagttctgggcttacagggatgagccaccacacccagccagttccttcaattttatcactgaatggtattccattgtatggctataccatgatttgtttattcagccactagttggaggacatattttttccccagatttgggctattatgaataatgctgctgttaatgtttgtgtataaatctttatgtggacatatattttcttttctcttggatagaaatctaggagtggggttgcagagtcatgtgctaaatgttgtgtttaactttaaaaaaaaattgtcagacttttccaaaatagttgtaccattttgtattctcagtagcaatgcatgaaggttacaggttcttcacaatctcttcaatattgatattgttatttttgttcttttttaattaaaaatttttattgtaaaaaaaatatgaaatttactttttttttttttttttttttttttagatggagtctcacttgttgctcaggctagagtgccatgatacaatcaaggctcattgcagccttgacctcctgggctctagtaatcctctcacctcagcctcctgagtaggctcctaagtatcctcccaccttggcctcccaaagtgctgtaattacaggcatgagccaccatgcctggccaaaatttactgtcttaatcgtttttttattcttttgattatagccattctagtggtatcttgtggttttaatttgcatttcccgaagatcatattcagcatctttttatataacccaggtttttgagtagactaacattttgttttcattctagtataccatgctttcattgctggaatccttttttgggtgttttgttttgttctagtcagcctaaattgttaaatcaggcttgggtgtagttagccattggcaactaactgtagctcagtccctaagaggcagttcctagagtaaccaatatacaaagctcagtaattgtaagccacagcaggactttagaataggagagacttccgataaagaagctttaggaacctttctgtattgtcttttatggttaccccattggaagagatggccaggaaatacccccttcccttgtcttcactctaaggtctcttaccatatcgatttctatgtgcttatctaagattcttgagctggagatgagtttgaaaaatattatggggagtgtattttttcagtcatttatagaattgagacagtaatttgttttctccatttcaagaatttgggagaaaaggctgtttctagtagaaaatattgctttatgttctctccattttcttccagtggaagtaaaaagtataagcccaataactatagtacatataaaagtgattattttgggctgggtttggtggcttatacttgtaatcccagcactttgggaggcccatggcgggaggagtgcttgagcccaggagttcaagaccagccagggcaacatggcaaaacccctgtctctacaaaaaatataaaaaattagccatgtgtggcagcatgcacctgtagtcctagctactcaggatgctgaggtgggaggttgcttagcctgggaggttaaggctgcagtgatgagccatgattgcgccactgcactagtctagcctgggcaacagagtgaaatcctgtctcaaaaaaaaagattgttttaaataaaattcctgaaaactaatttggcaaagaaggttgttttgaagtgaaatgtttgtagggcataattaatgttttgttaaataatgtctggatttttgttatacaggttgagtatcctttacctgaaatgcctggttctagaagtgttttggattgtggaatttttttggatttttgaatacttgcatatgcataatgtgttttttcagaggtgggacctaagtctaaacataaaattcatttttatttcatacataccttgtacacataatagcacataatttatacagtactttttaatgattttgtgcacaaagtgtcgactgcattttgactcctcacatgaagtcagatgtgaagttttccactgtggcgtcttgtcagtgatcaaaaaaattttggactagagatgctcatcctgtatcccaaatatatgaacatttattctgattctttatatcagggattcttaaggtactcagccttttaactggtctttctgtgatcactcttgcctttttccaaactaccctcaatatgtcactttttaaaaagtgccaattgtggctgggcacggtggctcatgcctgtaatcccagcactttgggaggccgaggcaggtggatcacctgaggtcaggagttccagaccagcctggccaatgtggtgaaaccccatctctactaaaaatgcaagaatcagctgggtgtggtggcgggcgcctgtaatcccagctactcaggaggctgaggcaggagaatcgcttgaacccgggaggcggaggttgcagtgagctgagatcgcgccattgcactccaccctgggcaacaagagtgaaactccgtctcaaaaaaaaaaaaaaaaagtgccagttatcatcatgaacagcagacaaaatgagacaaaatgatgtatagaatttaatatcttcataacaggtttattttaaggattcagagataagtcatgtaaagaacttaatgtggtgcttagcacatggctttcaggaaccagaagtagttgttactgttatatcagttttgtgtaaaaaccacttagtttgggcccagactcattaaaggatggcttttgcccattctacatagtatggcttttgctaatttgctagccttgacttttttttttctttccataatgacattttttaaaaaagccactatagtattattgttaatagaattaacagaaattccttaataaaagccattcttagtccatattccaatttggtgtcatctcaatatgtctttttatggtagttttgtttgaatcagtcttaagagtctgtatattgcatttgcagttaggcagcttaagtaaattttattctataacagccctcccccacttaaatgtgaaattccccacattctgtgtttggcttttccagtcttatggtttcccagcaatatgtggtttaaaaagcccctccaggcaattctgatgctcaggtttgctgtaagtttgctataacctatttctctgtttcttgtctttcctgaaaacttgaagttcgatttagatattttatcatatttacattccctttttttcaataaaattattttgtagatgttgtgtacttcctattcatcaaagttacctacctggttgccccacttgtagtgatttcaggtggtatcagccttattcttctattacataatttgccctttaactaatgattttagcattctttgttgatcattgcctgaattcattattttgttagagtttgcaaaatggtgatatcctgattctctaattttttatgcatttatttgctggaataacttttatcaactatttggttactccttgctacagaaaagggagcataaaaggtgatttccctttgtcattttccaaagtaattggtaatgagctgttcactgcaggttttttgttttaattatcatcttaaaagattatcatgagctattggattttagtgtgttttaatccactcctgtcaaattgtctcatatttggccaatggaagcctttttaggttgacttctgtttctttttgacatgacctcattaatctttgataacttcttgctttcttctggcctatgtcttaatctacactcctccttctaagagtttatcacctttgatttattttagattctgggatgtgccaagctgtactgctccctgttcttgatatagtcccttatacctttttgtttggctttttgtagtgatcatctgggcttattctaattactacttcctccaggaagccttttctgatttcttccagactagagtaggtctgactgtaactttgtttcatagcttattgcatgtccttctgtgacatctgtcatagttgtcattgtccacgtctctcttctttgcttacttgagccttttcttcagtgttaagcatcaagatttattttatagtcagaactctgtaaattcacgtaaggggttgtgtatggggaatagatgcctaggtttttggctggagcaactaagtaggtgcctttttttttttttttttttttttttttgagacaggttcttgctctatcgcccaggcgggagagcggtggtgcgatcttgggtcactgcaacctccgcctcctgggcttaagccatctccccacctcagcctcccgaatagctgggactgcaaggtgtgggccatcatggctggctaattttttattttttgtagacacggggtttcgccacgttgcccaggccagtatagaggctgatcttaaacacgctatcaaaaatagccaccttctccccattttctgtcagaacacacactttatatccattatagctcttttaataatttattataatttgtctcccccaagttcacattgttgtgccagtggacagcacagtgcctgagcatatgctgaggaaatatttgtagaatgaataaatgaaataacaattttaagggcagagggagagggtcaaaagttctgttttggatatttggtctggttttaattgccattgagatgcccacgtagagatgacagtttaataaagtcagtctggagttcacagtagagattgggattgcagatatgagtttgtgtgtatggttagtattaaaactacagaatggaagagatcatctaggaaaagggtgtagatagagaagtggaaaggacggagggcttcgccctgaggatgtgttaaaatacacagatctgagagaggaagatataccaagaagatagatagggaaaagccagggatgtgtggtgttagggaagccaagaaaagaaagtgtttaaaaaatgatagagtgagtgataaattgtttgtatactggttgctgacaggtctcgtgaaatgagaaacagaaaagtgtccattatattagtcaagatggaggaaattggtgaccttgatggttttttggtagggaggataaatgtttggggggaaaagtgagatagatgtggagtaaatgtgaggaaatggccccactacttaactttctattatttctataggataaatattctgtagtgccgagttattttttcacttgcagtgttctgattttatgtcacattttgagcttctgaagttcttaaaagctagcttcataatattaccaacaattttaagaatcatgtttcagaagttttgttttttaaatgggatttttaaaaatttgtcatacccacaagaatttttattttacttaatttattttaaatatatgtatttttaattgattggattatacacgtcccagcctcttgtaaccactattctactctacttctatgagatcaacttttttagtttctaaatgtgagtgaggacatgtggtatttgtctttctgtgcctaatttcacttagcatcatgtcctccaggctcatccatattgccgcagataatagaatttcattctttttaatggctgaataatattccattgtgtatatatacgacattttctttatccattcatctgttgatggacacttaggttgattgcatatcttggctagtgtaaatactgttgccgtaaatatgagtgtgcagatatttctttgacatactaattttctttcttttggatatatattcagtagacagattgctggatcatatggtagtttaatttcacagtaagaagtgcaaatattataattttggttgttaattttatctgctttttcatccctaagtagtggaattagatttgttttttacactgggtttattgaaaaaaagagaaaaatacagctttaaagtgtagtttatgaaacttggatatcacttcttttttttttttttttttttttgagacagagtctgtcacctaggctggagtgcagtggcacaatcccggctcactgcaacctctgcctcccgggttcaagcaattcttatgcctcagcctcccgagtagctgggattacaggcacgtgccaccacgcccaaaaatttttgtatttgtgtttatttatttattttaatttttgtatttttagtagagatgggagtttcaccatgttggccaggctgatctcaaacgcctgacctcaggtgatctgcccttcttggcctcccacagtgctgggattacaggcgtgagctactgcacctggccttggatctcacttcttactaatataataattatcttaaatcctattgattttaaacttgcttaaaataacttcccatgtaaaacataagataacctctttcattttaaaggagtcctaatctactctctcttgattttgtttctgtttctgggaccaccattctcttagtctaccaagttgaaaatcagagatcattgtttattcctcctagtctttgattgccatatttgctcatttgttaagtcctgttgattcagattcttagtagcttcagttctttttcattttccactgtcatcaccttatacaaaccgttgatgcctttcttgaaactttgccattactttcccacttcttgtgtgttctgtgttcccctccacaccatactactacttttttcagcaggaagacagggtctcactgtgtcacccaggcttgagttggagttcagtggcgcaatcctagctcactgcagcctcaaacttcacttcgagcagtggtcccacgttggcctctcaaagtgttgggattacaggtgtgagctgctgcacctggccccacactgttcttctaaattgattttcctagatcataattctaatcaaaacactcagaagtcttgactcctcattaagcaatgaggattgatctgtgctgcacactgttttatgtgctttacacctattaactcatttaattctcacaatagctttataaagaggtctgattatccctgtttcattgatgaggaaacaggcacagagaaattaagtatcttaccccatgtcacgtggctattaagtgatgaaattaagatttgaacttagatgtttaagttctagagcctttgttcttaaccaagttcaaagtcctcagtttggcttatcagccttttatcaagttgtagctggtgtgatggacttgatgagttcagatccatgccccagtactgcggggtgtctgtgtgtatgcttgcatctcttaattctgaaatcagaccacttggttttcaaactcgagttctcacacttaattgctgagtcctcaggcttcattctcttttgtcattaggtaatgctagaagcagtgcctcttgatctgttatctcataccactctgcctaggagacaagactctgtactccaagattttcagcaaaagtcctaaactcggtgctgtttatatcacccttgaacttattcatggtcatcatgacctgattggcttaggcatagactacctattttggttactgtggcaaggggaatggagttgctctgattgtggtagtacatctggagctagtagtgaggtcagtctcccacaaaatgctggctgaagagggggaagtagatactgaagagatagtcccagtatttattatacctaccttctgatagttgttttgaggattaaatggcatagtaggtactcagatgttagaatttcttcccacatcccctgctttagttcagtatgtgctgttataacagaataccagagactgagtaatgtataaagaaaagaaatttataaggctcatagttctggaggctaaaaagtctgagagcatggtgctggcagctggtgatcccgtggaaaaaggcatcacgtgggcaagagaaaatgcgggtgagagcaagggggtgctgaactcacttttataacaaacccactctcgagataatgaccttaattcattcatgagggcagagccctcataacctaatcacctcttaatagtctcacctctcaaaattgttgcattgaggattcagtctctgacatgtgaacttcggggacacattcaaactatagcactctaatcccccaatttctcttttccagccttcattttagtttgtcctctagtggtagcctctaattaggaccatttgatgtttcttgagaataatctgtttcatgtgtttgcaaactgcttggaatactttggatgtgacgtattttacagctccaatagaacccatgtttttcctgtatttcttcattgtggcagatacttgcttgtgttttaattgcatttttatatatctatattaatacttcactagattgtaagttctataagggcacagcctttgtctaacttagtgctgtacttctggtatccagctcaaagaaggcattcaataaatatttgatgaatgaacaaatgaataaaaatagtcactgaactgaaaaagttctaattcatttaacaaagatgcttctgttttgtgttgcttgcctaaagttattcattcaatgagcaatttaagcagatttttctttgacatcattgtttatcaatttaaaggaaaattttatttattttgatttttttaaacattgcaagggtggcctcattttccagaataagtttccagaataagttttggaatcggttatgactcccataaataaggattttgtatgtattttgattaatttctagttactttagaatataaaacacaaactgcacatttgtaaaaaatagacattatttgtgaataatttaaatattaaaaaataaatattttcaaagaaacaaggtctcactttgctgcccaggctgggcttaaactcctgggctcaagctatcttcctgcttcagcctcccaagtagctgagactacaagtgtataccactgcacccggctaatattttaaattttttttaacgaaatgcctgaacattttttaaagattacatagtaaagccccatgttaatgtaccgtctgtgacacgatcagttccaatcatggaactcctgactggctaagtggtgaagctcgttacttgttaatttttttgttttttgtttttttttgagacggagtctctgttgcccaagctggagtgcagtgatgcaatcttggctcactgcaacctccgcctcccgggttcaagtgattctcctgcctcagcctcctgagtagctgggattacaggcgcctgccatcacgcccggccaatttttgtatttttagtagcggcggggtttcaccatgttgggcaggctggtcttgaactcctgacctcaagcagtccacctgcctcaacctcccagagtgctgggattacaggcgtgagccactgtgcccggcctacttgttaaaatctgactcaaaatattatgtgttgaattttgccctgcccaatagcgttatgatatatatatagtcatatatatcatatatatagtcatatatatcatatatatatagtcatatatatcatatatatatgatatatatatagttataagaaatttacttatgatagtagttccctgtcccaccgtgcctcaaacccagtcctgatcttagaggcaaactgctttttcaattacttttgctgtttttttttttgaatatttactttaatatttttgtttttattattatttttttgagagacagtctcactctgtcgcccaggctggagtgcagtggcgtggtcatggctcagtgcagcctcgatcatctgggctcaagtgatcttcccaccccagcctcccaagtagctgagaccacaggcaagagctaccatgcccagctaatttttattttttgtagagatgggggggtcttactttgttgcccaggctggtctcgaactcctgggctcaaacagtcctcccattttggcctcccaaagtgctgaaattacaggtgtgagccactacatccagccttcttttatagtttcaaacaaattaaatatactgtttattattgatttatttattatttcctgataattaaagatttaggtctttaacacacacacacatacatacccttctccttcattctttcaatattagaatttttggttgaatgatcaaaattaactatattgttgtatcgtaaatgtctgttcactgatgagctaagtgtattttatgttttctttccttttgaaggtaattgctgaatttttgtgtttcgttttctttgaaatcattagtatttctatatccttcaacggctccataaaacctctaaaagcaatttatctcttagtcaattatctgacagataattgatcagttcatattgtttcctcctggatatgtccttttttggaaccttccagccctctctggctccagtctggactgctggccctgtaggtatgctccctagtgttgtcaggaggcttcctttgtcttgtcttgggaattactttgcccttttgtttttccttcttttttttttttttgttgggggcagattacccattgactggcttccatggcttcttcctctttggattattcctgtgtttcagtggaccatatctatccaggagtttcctgagaatgaaagggtgggagataaatttttgagactgcaagtctgaaaatgtctttgttctatctttatgcttggttggcagtctgctaagtacacaattctagattgagattcattttaagtcagtaatttgaaggcattgccctattgtcttgagcttccagtattgcagctgagaagtcaaaagccataactgacccccaagaagctttttgggggttttcttgatttttctctttaccttcattctgaaatttcagtgatgtacctcatgattttgtttatttttgttttttaattcatttgctgatatttgatggggcttttaatctggagacattttagttctaaggaattttcttacatgatttcttagattgcatcacttctttttagaactttagatcctccagggacagtctcccgtattgatctttcaaatttcttgttttttttttttggtctgttttgttttttcctctcctaatttctgacttagttttctattctacttctaggagatttcattttttggggggtgaagtgtctatttttatgtcagttatcatgtttttagtttccaagagctcattcttattccttttcataattctcttttttcagatctgtttttcaacctctttctctgaagtcctaatgaccgtgagtctggtatttctttgacagtttctgaagagaatacacctgttctgtgtaaaggatggggttaggaaagggaacttcatagtatataagcatacacaggtgatattgcatgttcaattctaggccagtaaatattgccaaaaagtaagctacacaaattttttggtttcctagtgcatataaaagttacatttacactacgctgtagtctgttaagtgtgtagtagcattatgtcttaaaaaacaatgtgtacctaactttaatctagaaatacttaagaaacggaccaggcgcggtggctcacgcctgtaatcccagcacgtcgggaggccgaggcggacggatcacttgaggtcaggggtttgagactagcctggccaacatggtgaaaccaccacgcctggcctagcctccacttctaattctaattctcttgctatttccaccacatctacagttacttccttcattgaagtgttgaacccctcaaagttattcataatggttgacttcagcttcttccaaactcctgttaatattggtattttcacctcttcccatgaatcatggatattctggaatgatgaatcctttccataaggctttctttccctccctctttgcctccctccctccctcccttccttcctttctctttttctttcttttttatttcttcattgagacagagtctagccctgttgttcaagttgaagtgcagtggcgtaatcttggctcactgtaacctctgcctcgcgggctcaagcctcccacctcagcctcctgagtagctgagactacaggtactgccacacccggccaatttttgtgcgtgtttgttttttgtttttttgttttttggtagagtcgaggtttcactgcgttgccaaggttggtctcgaactcctgggctcaagagatccccccgtctcagcctcccaaggtgctgggattacaggtgtgagccacagtgcctggcctccagaaggttttcaattttattttcccagatttatcagaagaatcacttatttatggcagctatagccttacagaatgtatttcttttccttctttttatttttctttttttaagagacagagtctccatgtcgcctaggctggaatgcagtggtgtgatcctagcttattgcagccttgaactcctgggcttaagtgatcctcccacctcagctttccaagtgtctagtgctataggtgtttgccacgatgcctggctaatttttttggttttacataaggtcttgctatgttgtggaggctgggcttgaactcctggcctcaagcagtcttcccaccttggccttccaaagtgttgggatttacagtcatgagccaccacacctggccctaaaatgtatttcttttttttttctttttcctaaaatgtatttcttaattagtaagacttgaaagtcagaattactccttgatccgtaggctgcagaatggatgttgtgttagcaggcatgataacattaatctccttgtacatcaccattggagctctttggtgacaagatgcattgttaatgagtagtaatattttgaaaggaatgtttttttctgagcggtaggtctcaacagtgggcttaaaatactcagttaaaccatgctgtcagcagatgtgctgtcatccagactttgttgttcatctatagagaataggcaaagtaaatttagcatcattcttaagggctgtaggattttcggaatggcaaatgagctttggcttcaacttaaagtcactagctgcattagcccctaacaggagagtcagcctgtcctttaaagcttggaagccaggcattgatttctcctgtctggctatggaagtcctagatggcatcttcttctgataataaataggctgttttgtctacactgataatctgttatttagtgtagccagtgtcatcagttatcttcgctagatcttctgggtaatttgcctttttaccttgtaattttatgttaatggagatggcttctttccttaaacctcatgaactaacctatgctactttcaaacttctcacctctctcagacttcatagagttgagagagttagggccttgccctggattaggctttggcttaagggactattgtgactggtttgatcttccatccagaccattcatattttgtccctatcagcaataaggctgtttcactttcttaccatttttttattcactggggtagcacttctgatttcctctaagaaattttcctttgcattcacaacatggctaactggtgcaagaggcctgtcttttggcctgtctcagccttcctcactacgcttgatcatttctagcttttgatttacagtgagagatgtgcaactctttctttcactggaacacttagaggccattgtggggttattaattggcctaatttccatatggtatgtctcagggaatagggaggctccaggaaagggggagagatgaggaatggttgatggagcagtcagaacacacacaacacttaccaattaagtttgctgtcttatatgggcacagttcctggtgcccccaaaacaattacaatagtaacatcaaagatcactgatcacagatcaccataataggtcaaataataatgaaaaagtttgaaatatttttagaattaccaaaatgtgacacagagacaaaaagtggcatgttctgttggaaaatggaaccaacacagagttgccaaaaaccttcaatttgtaaaaaaaataaaaataaaaataaaataaaaataaaaaaagtggtatctgcaaagtgcaataaagcggagttcaataaaataagatgcctacatagacttctgttctgttcctttttcctccattcttgaaggtaccttatgcttccagggactttgcttctctgggttctgagatgaatcctgtggttgctcattgacactcccatatgtagacatttaggatgtagttacttgtgtttttgaaaattcatttgctagatttgctagttttcatctttcaaatatttattgaagtctctacatttgatattttcctgtcatattctctttgtcttaaagatacatacatatatttcatttactgtcattttagtgggctttgaatgtgtcagtgtcccttgcttacatggatttcctgaaaaattttaaagcttttattattattattattatttttttgctagagacagggtttcaccatgttgcccaggctggtctcaaaactgctgggctcaagggatccactcaccttggcctcccaaagtactgggattatagacatgagccctgcacccatccctaaagctttttattaaaaaaaatttctaacaaaaatgtaaagagcatgctctaacatctgccattacccagatttcacatttatcaacatttctggttttttgtttcatttttcccccaccttattttaaatattaatactattactgtttttttttggttggtactgtattttaaaacaaattgtagacatcctatcatttctttttcttttcttttttttttttttttgaaacagaatctcactctgttgcccaggctggagtgcagtggtgcgatatcggctcactgcaagctctgcctcccaggttcaagcgattctcctgcctcagcctcctgagtagctgggactacaggcgcacgccgccatgcctggctaatttttgtattttttttttttttaactagaagtggggtttcaccatgttggccaggatggtctcgatctcctgaccttgtgatccacccaccttggtctcccaaagtgctgggattacaggcgtaagccaccatgcccggccacatcttatcatttcatgtatacatccttgaatatgaatcttgaaacaattactaatagatctaaaaatgagcagtgattctttgatatttaatactcagtccatgttcagttttccttgattgtctcagaaatgactttttagagttggatgtttgaaataggatcccagagttcacatacttatttgtctatagaatgttccatattttggatttgggtctgatttctttttctttttttttttttttaattatactttaagttttagggtacatgtgcacattgtgcaggttagttacatatgtatacatgtgccatgctggtgcgctgcacccactaactcgtcatctagcattaggtatatctcccaatgctatccctcccccctcccccctccccaccacagtccccagagtgtgatattccccttcctgtgtccatgtgatctcattgttcaattcccacctatgagtgagaatatgcggtgtttggttttttgttcttgcgatagtttactgagaatgatggtttccaatttcatccatgtccctacaaacgacatgaactcatccttttttatggctgcatagtattccatggtgtatatgtgccacattttcttaatccagtctatcattgttggacatttgggttggttccaagtctttgctattgtgaataatgccgcaataaacatacgtgtgcatgtgtctttatagcagcatgatttatagtcatttgggtatatacccagtaatgggatggctgggtcaaatggtatttctagttctagatccctgaggaatcgccacactgacttccacaatggttgaactagtttacagtcccaccaacagtgtaaaagtgttcctatttctccacatcctctccagcacctgttgtttcctgactttttaatgatggccattctaactggtgtgagatgatatctcatagtggttttgatttgcctttctctgatggccagtgatgatgagcattttttcatgtgttttttggctgcataaatgtcttctttcttcctcacagtatactttaccttgttcctctgtctacattactttctttaaattgagagttagatctagaggcttgattagattcagagtcaggttttgtttgtttgtttcccaagacaatgtcataggtggtggtatgttgttttttttgtttttgtttttgagaggggggtcttgctttgttgcccaggctaatcttgaactcccaggctcaagcagtcctgcagcctgggccccccaaagtgttgggattacaagcgtgagccaaaaaaacagaaagtaccagaaagcacagaacctcaggttgtcacatttctagtggtgctaagatggatcagtaggtttatggggtgtcaacctgatcctgccattatagggttgcctatcaaccattcacctcatggttttagcatccattggtgatgattacagtaattattatttcagtgatgctcaaactttagcattcatcagaatcacctggaggactagcaaaaacttagaatgttggaccccacccccaggaatttgtatttctaacaagtttttaattagtgctaatgttgttagtgtagggaccacactttgagaaccacaatatgatatcattagtggttgcaaaataatgatttgatagtttgcatttcttctgaaataagttttttcagtaaagatagtatatatgttttatttaccagttttcaaaataatgattcagtgttctagcagctttcaaaggtgaccagtgaactttttttggttgatatttccttttgtttttttagtatttgattcagtctgttgcagtcatgatatgtttttgtgaatcatctttggctggttgggacccttttagatgggcacctattttcttctcacattaccttagtagtttttttcgggcaccgtgtgttattccaagcatgtttttacgacaggaccatttttcccagcgattccagttccttttggtaggaacagcatttagtatcacactgtattctagagatcttcattgtcactggtcatcattatttctaggtgttttcagagtacaaaacagagatacaaaatttctcttgttcaaaaaaaaaagttaactgaaagttccaattcaaattaaattttgttttaatttttaaaatatttcttttatgttgaaaattctgttttctaacagtcttactatagtttattttataacatatatatatatatgtatagtagcttcagaataataatagtgcaccaccgtgccctgctaatatatcttagacaatttttttagtagatacagagtctcgctatgttgcttcgactggtcttgaactcctcagctcaagcgatcctcccacctcatcctcccagagtgctgggattatagacatgagccatgcacccagcctaaagtacaatttattgaagtataacatgtattcagaaaagtgtacggatcgtaaacatacacctcagtacagtttctgaaagtgaacacactttatataatatataataagcacccagatgcacaagcaaaccgttaccagtgtcctggaacctacttcatttgcctttctagttactctccctcatctttgcctggggtaaccactatcctcacttctaacagtataaattagttttgtctgtttaactctgtgtaaatggaattatgttccaattttagtatatgtgatgtggaagcaagcccagtggaatcatattgtaatcacacactactgtgtttggcttgttttcaaggtatttcagatttattcatattgccacatgtagcagttgctgctgtttagtattttgttatgtgaagatacaatttacccagtctattgatggagtattgtttttcagtcaaagggttatttccaatttttgactattaagaatagtgctgctatgaatatttttatatatgtctttcggtggacagatgctgaatactttagctgatagtttctcttcagcatttctgtgtttggaatgtatgttatatgacagttccaaagttacacacattgcattcctaaatatgttgtgtaatacacattgcacatgtgtcagaattatatgtttaaccccaatgtaattgtggatgtagaagatatagataaaactacaccttaccatataaaatatgcagaagtacaccagtgacgtcagttttgctatggttgcagtaagcagtgcagttctacaaatttaccattttaaaagcattttgtcaaactttctggatacaaagatgctgccaaggaactcacagcctaatacatgagttaagatatgaacatagcatacattattttgcattgtgctgaagtcatttaagtaccagaaggaatgtgtgaagtgctatagtagattaaaaatgtggcatatctataaacacagatttaaaaggtaagagaaagtaacttatagcaaaatatttatttgtagcttatgtgtcaggcagaattttaaggactttagatatattaattcatttaatcctcaaaacaactctacagggctgggcaaggtggctcctgcctctaatcccagcactttgggaggctgaggcgggcggatcacctgaggtgaggagtttgagaccagcctggctaacatggtgaaaccccgtctctactaaaaatacaaaaattagccggacgtggtggcggacgcctacaatccaaggtactcaggaggctgaagcaggagaattgcttgaacccggggggcagaggttgcattgagccgagagtgcgccacttcactccagcctggacgaaagagcgaaactccttctcaaaaaaaaaaaaaaaaagtatatataatatgtatatatatatttatatttatattgataaattcaatatggaattattagatgatacatattttatttttaaatgaactgttttattatccttactgttacacttgtgtataaaagatgctttgggattttactttttttcagtaaatatatactgataaatgtttacatgttaatttaaaaagctcagaggaaagattattcaactttctgaaaacatagcatacacaataaataactgtttgccagggggcaaaaaaagctctgttgtcttctagtaccagttggtattacgtaggtttgtttgctgtctcatatcttatttatagaagtttggaactggaaactagatactaaacaaacagtaatgttccactgtagtttatgcattagaatccttctttgatcataagtatttttgcatatgcttccgtgaaactagcaacttcggagaaactggcaacttgcttggatcaaatccatttttatataccttaataccgaagcaatatgtagcacacctaaatgtactgatttgtttagataatatttgtaaaagctttgtaacattactaataagttataaattaatagaagataccatagcagttagagagcatgaggaaacatttatgggtatcatatgtctgactttagaagctttgcagactccttcctctcaagaaaagagcttctgttgggagaaatttcaaattccatgactgtgtttgttaaaatatttcagatatatactaaatattctggtgctctcagaatttgcaagtatttaaaaatcatactagtggataattttagttgtgtgtttattcttttattggtcttcagcagctgtctaaccttgctttcctccttgaacatggagaccaaacattgggatgacttcattttaactagaggttacctttattagttagcctgattactcttttataataacagagaacctttgtgaatgaatttttcaaaatcttacagaacgtatgggagggtgtgaaatgaaagataggtgtgtgactttcaaaagttgatctgaaagagctcttaaaaatctaagacttgttcattgttacttttttagaggtaacataagatgttatatcggatatactgcctttacactatttggaaaataaagactattttggctttgttttaaaaatgcaaaggaggccagacgcagtggctcatgcatgtaatcttagcaatttgggaggccaagatgggaggatggattgaggccaagagttcaagaccagcctaggcaacaaagtgagaactttgtctctacaaaatataaaacaattagttggacatggtggcactcatatgtagtcccagctacttcagaggctaaggccggagaatcacttgagcccaggagttcaaagttgctgtgagctatgatcacgtcactgcactccagcttgttaacagaatgagactctgtctcaaaatgcaaaggaattaaacaattgacttcaaacataattgtttcatttgtttggtaagcacatgttgggcacatcctccccctgctccctctttttaatgccagccactgtactgggccttcatagaagaatgagatcctgtagagaatgagattaagaatgactaatgattcttaatcatttttcctgccaaatacccctctagcaacctggtaaaacctatacacaaacctcttcttataaaaatgtttagaaacacttaaaatgaaattcatagaggattataaagtaaacttatgttgagatagttgtcagaatattaaatttctaatatagtagcacatactatattattaactcatgaaataacaagacctagcagtggatctaataagtattgtaattttgaataatgatgtgcataaacacatttttctaggtatctacatcagctgtacaatgatgaaactatctatgattcctattggtgatcaaagttataggaaccttatacctctgaagtttgttgcctgcattttaatagaaggaaacgctaaatggtagttagagattggtggaaatctctaactacaattcattccccatccaagttgacaggcacaccaaaccacagatctgtgtgggtcagcagattgcatgttaagaatccctgatctaggagctttagtttaggctgtgagactgacacttcagtgggtagttatataataattgaaacctgagcaggggttttgtctcatttatctttacatttttataatctcacagtgtccagtaaacattaaacagttagttattaatagagctagataaataatttgggggtatatatgggagattacttctgttagaagaggtagcattgagctgtattctaaatttagtatacattggaattttcaggttggatgaagtaaggaagaggtactcagaattgaggcatgctcataggaatagcatcaggaagggtatgacaggtttgatgattattgagagtcaagatacacatttaagggaatggcaagagatgagaggttgagataatgctggggctcagattataaggagagttttgtgtatactaggcaactggtaacttacaatgatatggtacaatcagctttgtgttttaggaagttatctcagttgatgtcatgacagaaaaatgggacagagtgggaagaaattagaagcagaggccagtgaagcactgttgcagttattacaggttagagagggcagggtcatgatggtagcagagagatgggaaacagcgatccatatctgggagaagaggattctatgcttgactgaatatgggatgtgaaggagaagaagttgtggcctcaatctacccaattgggagactggtgcatgggccatggtagtgccaaaacatagagctattaaggtaaggaatgcaggagggaagagtaggcatggtggagaagatagagaaatttagttgtacttagtaagtttgaggtaggctgagattcaggtaacagttttcttagtaggcaattggggtgagagattttgaaattttaccctttagatcaatcacttttagatcattacagtaattttttttttttttggtttgaatttgttttattcagatacagtttacatgcagtaaaatttattcttttttaggtttgcagtttgatgagtctgacaatgtatagtcatataaccaacactacagttgagatatagaatattaccccagaaagttccctgtaccttttagtgattctcttctcccccacatcgagcccctggcaagaactgatgtgatttttatccctacagtttggccttttccagaatgtcttataaatgatatcatacattgtgtagccttttgtatcaggttctttcacttagtataaatgcctttgacattcctctatgcatgttattcctccatgtatcagtagtgtatttttgttgcaaagtagtattcctttgtatgtgtgaaggttttaagaaacacacctacctgggctacaaaccctaatatatctgaattcagaaggatagccaggaaatggtaatttcttggactcccgtctcatggtatgagataatggtactagggagtagagtgcaaggaggtcatagtgtcaaatgtgcgtaggtggaatggaacataagaggctgtgcttaggactgtttttcatgtttggtttagaagggaaggtaaatgtgacagtaacgtaaaactttttaaagataaataggtgaaagaaacaaatcagaggtataaggaatagggaagatttaacaggagactagaagggatggatcaactctgtagacgtgacgagggagaggaacgcttttttctttaaggtaaaaggagaactagtatgattgggtgctgttataagtgaattgagaggacttacagatttttgatctgagtgtctggatgagtagacttagtaggttgactttagagaagtaaacttctaattaattcaaatactggttttcctgttttggaacatgttcctttttcatccattgtttcttagttttgtggcactttgctggttttcaagctagtgggcatcaagcttttctctggccagttctttcctatcctgaaacccttcagtggaaaaacaaatcatgttctgccttaagagtatgatggttattaagctattttgtattccttggaggaaaggatatacaatcctggggattcaaagaagtgcttcttgaaatgaatgtgaagttttagtatcagactagaggtacagacaatcataatgtagaaagcatagatgtttccctttctccaattttcttttccttggggttacatcttttaatagttaattctgagtttactagttagaatttatgtctttgtcacaggaaggggaacatcacactctggggactgttgtggggagtggggagggatagcgttgggagatatacctaatgctagatgacgagttagtgggtgcagcgcactagcatggcacatgtatacgtatgtaactaacctgcacaatgtgcacatgtaccctaaaacttaaagtataataataaaaaaaagaatttatatctttgtattgtttctaattcatctttcctgaaaatgtttggtgcacatacaaacaaactgatatgtttgtttgcctctacactgatggtatacatacagttttgaattttgcttttcttcacgtgataatcactttggagatcttgatgtgtgtgatgcacattctaagggttgaagagagaaacattatccctataccaatcttagaggtagtcttactttatagacaagtaattgaggactagagaagttaaggcacttctctacaatcacagagaatcagtatgtggcacagttggaatttaaatctaagtttggctgattcagagcccattcttctgtttttggcatgttgggtgtgaggaatgattcttggtttcagcatattgtctgttaccttatagattaatagcccattgtattaacgcatttctgttagtgaattagtcctatcgggatacatacacagatgcaccccttggtttttctaaaagaacatgctgatacatattaaaatacaaacccactgaaagacagtgcttgtaaagcattctaaaatgtctctatttcatgaaccagctacttaatgtattacaatatggtagtcttattgaggtttataaattaaaaggcagtattttctgctagacttgtctacttgaactcaacacaagagttcagattagtgagccagtttacatactgaccagtctgggccctgtgatcattagggcctgcttttcaacttgcttgtcagctgggtagaatacaagcttgctatggcttccaggaatgtgtatgtggacttgtctgaaatagcagagttgggacatacagaagttgagaaaggaactattgtgttttcttgtttactgcatgaacctcaatttgttatagatacggattgttgaagacctgggttctaagccattggttgcctgagcactcttactctggaccagaccttgtttagttaaagcatccttaaaaaatacatacattggcatttctggtctgcactagctgccaggacagcacttagttgaacagaatacttagattgattttctcgtagtcatgtacttatagtagaagagataaaggaattgaaaagcagtcgtaattgcttctgtaaaaatcccagactcttcagtgaaacaaaaaagcaggatgttacttgtgaaatggtaggactggatagatggagccttttgcaaaaacagattttgtcatgggcaacagatttcttaaaggctcccggtccctcatggttccattgctgggattaagcctttttgcattgcagcatggagagccttttatttgagttaaattcagacttcttggtatgtcatctgacagtcttgtggtttcagataaatatggttcattgctgttattaacctgggttgacagttgtgcatgactggagtttttagggattttgaaaagtggaactgcttaagagaaataggatgccactaatgtagagcttaacttaatgtgatattcaagtgtgttaacatcaaaataatccaaatctagttattaatttggtgatatatttgctttaaaatatctgaaaattttaaatgccaagattttagatacttattttattgaaagttaaattatgataataaccttaattattagaatgacttcttgaaaatgttttaagcaagtattaattattgttttaaaatatgtaattcataaatactgtacagtatgttagtccttggtttatgtttattttatgattctctttctgccatttgttgctcttctttcttggtatgtttacatgggaaccttcactgcagatttttggaaagcagtgtgcttttctgtttgtatcccatatatatatttataagtaaaatgtaaattaaaagcttgacattgtattagtgtattgatcataatccagttatttttatagttaacggtattctctaattttactgacatggacctgaatttatttagaattatttttgatgctttgtgaacaccttaaatgtgtgtccccacttagtcatttgagttaaataatttgaattagtaatggccttatactaatttaggtacattgtttttattttattttattttattattagtttttgagacgaagtcttgctctctcgcccacgctggagtgcagtggcacaattttggctcactgcaacctcagcctcccgggttcaagcaattctcctgcctcaggctcccgagtagctgggattacattacccctggctaatttttgtatctgtagtagagatggggcttcaccatggtggccaggctggtcttgaactcctgacctcaggtggtccaaccgcatcagcctcccaaagtgctgggattacaggcatgagccaccatgctggcctgtttttttattttaaataagtcacattatacaagttcccccctttttaaaaaaaaaaaaactgtgtatgacccagttaaacaacttggatactgggtctctattgttttagctcatttaacattcttccagtgttttgctgtagtttttaagttcacaggtatatagagttaatgtcagaaagttaaaccacataggccaggtacatttcaattaggtatacgtattgctgaaaaatactaagtaaatatgatagcatattatgatacatgatagctcttatggtgtagaaatctactatttgccaatgtgccatttttaccaagaattcatgttaatgaattttttgtgcatataattttatgcatgttaaattgtacaataaatataaatgaattttggaactttaatgctggtaatagtttatatttttgttatggtatttttttcacatctaatttgattaaatgatgatagtaatactatggccaagcagctgactatccctgtcattgaaatgtaaattacagtcactagaattacattaataccctgagtatagttgaatttattgtgacaaaataagtctaaagattagtgttcttacaacatttagtatattaagatgtagttagagaaaaataattggatataaacagcctatataaatattaatcaagattttgtgatacaaataagtcctaaattgataactaaagtctttggaactgagattagcaaatcagtcatggaattattttcctgtcagattagagaattataattccttagatagaaaaatgattactatatatacaggcttccagcattaaaatggtactccttgaaataggcatttactcacttgtttagcaaagtggttgaagttttattacattcattatctcttacagcttcttcctatggtatttaggttaatttgtgattaaccagttgtcaatctggaaggaatttccacagcttacaagatcaaattgaattatatagaaactggtacaaaatgatgtcttgtcactgatggtcctacctgcttaagaacatttcttttcctttttttttttttttttttttttttttgagacagaatctcactctgtcaccaggctagagtgcagtggtgcaatcttggcttactgcagcctccgcctcccaggttcaagcgattctcccgcctcagcctcccgagtagctgggactacaggtgcacaccatgcccagctaatttttgtatttttagtagagacagggtttcaccatgttggccaggatggtcttgatctcttgacctcgtgatctgcccacctcggcctcccaaagtgctgggattacaggcgtgagccaccacgcctggccaagaaaatttcttttaagcctgatagtaggagatactttcaagtggagtgcagtagagttgcagtgatataagccgtagtggttaatgttaggtctcagcctgactggattatggaatacctggaaattggaagagcattgtttctgagtgtgtctgtgaagagtgtttcccgaggagatttggtgtgggagtctgtggacggagtgcagatcagccctcaacatagataggcaccatccagttggctgggggcctagacagaacaaaaaaaaggcagaggaaatgggatttcctctgtctttcttctggagctggaacattgtcctgcctttggacattagaactccaggctgtctggcctttgaactcaaagacctataccagtggctcaccaggttcttaggcctttggcctcagactgagaattacaccattggtttccttggttctgaggtatttggatttggactgagccatgctgcttgcatctcgggtctccaccttgcagatggcctgtcatgggacttctcagcctctgtaatctcatgagccaattttcctaataaatcccctctcatatatctgtatatatattctgttgtttccacctctctagagaaccctgaccagtacagaaaccttctagactgtgacatttgggcttgactgcttcctggctaaataacttagaaggagatttaaccagcattcaactgaattgtagattgggaccggggaaatttaaacatttggattggagaagtctctgcttgttaaagataagtaggggcagggctttaaaaactacaggccagctgcagtggctgatgcctgtaatctcagcactttgggaagccaaggcaggaggattgattgagaccaggagtttgagaccagcctgggccacatagcaagaccctttctgtagtcctcactacttggaggctgaggcagaaggatcacttgtgcccaggagttcaaggttacactattccagcctgagtgacagagtgagaccgtgtctcaaaagaaaaaaaaaaaagaaaaagcagtaacactatagaatagaggaaagggaatattaatctgcagacttagaaaaagattaggtttctgaaatttactagttggaatcaaaatttgtaatcagataatttggcatcctcaatagtatgcaagaaagaatgttttctgaaacagcagagcatgagaagaagatacttggcaaagaagatgtaagattacaatgaaaagggagatggagaacataaagattgcacagaaatgaaaatttatgtgacaaaattaggttttatagggctgttaataaaaagtagagttgataagtggggtatttagtaagtgtcatgaaggtcaaggatgaaattctgctgaaatacagaggaaaaagaaaaggtgaagaaagtatcacctgttatgtgctttagagttatgtactgtaaagataaaccattggaacagaagccaatatcagatacttaaagtgaagacatcagaatagaagaaaggatatttacacgcagattaaaagggtttaatattctttaaaatgtgaattaaaatagttttgatttctttttaaggaaagcatgcttacatttgccttttattgctggatttctcaactcatcctagtaggtactaatggagaaagaaacatgttctaacatatcctcagggtttgcctaaagaggtgattttccatcaaacacttacattcactgaaagaaaacagtttatgatgcatctgaaagaaagcatgcttacatttgccttttatagctgaatctataaacccatgtaatatgaatcaatagaaaaggaaacatgtcttagaaaggtgtttctccctcaaacacttccattaactgaaagaaaagttttcatgatgcttttttttttcccccgcagacaaggtctccctctgtcatccaggctggagtgcagtaacattgtcacagctcactgcaatctggacctcctgggctcaagtgatcatcttacctcagcctcccaagtagctgggactacaggcgtgcaccagcatacttggctaatttttcattttttgtagaggcaggggctcactatgttgcccaggctggtcttgaactcctggccttaagcagtcctcctgtctcaacctcccaaattgctggaattacaggtgtgagccaccacacccagccgtatgatgcatcttaaagaaagcatgcttctacttacctttaaggaagttttaatttcaccaagtatagtgtcatagagcagtataacagccattttcatgcctgaaaatggcaaaattttgatatctgagtgaggagttattgtatctagtcctcgattctacaaaaatattgagtactatctataaacagtaaataattgatgcatgtgtagttctggttctcaaatgcgtatagatgttcttttcagtagtgctatactaaattcatagtatctttcagtcgtattttgttagttactgtgtacttaatttttaaaaaacattaaataggtatgaccaggtatggaggcctgacacccctaatccagctctttgggaggctgaggtggacagactgtttgagcccatgagtttgagatgagcctgggcaacatggcgaaacctcatctgtactaaagaaacaaaaattagccaggtgtggtggtggacacctgtggtcccatctactgggaggctgaggtgagagtcacttgagcccaggaggtcgaggttgcagtgagccatgaacatgtcactgtactccagcctgggtgacaaagtgggaccctgtctcaaaaaaaaaaaaaaaaaaggtgttttaggccattcttgtattgctataaagaaatacctgagatttgatgatttataaagaaaagaggtttaattggctcatggttctgtaggctgtgcaagaagcataatgctggcatctgcttggcttgtggagaggcctcaggaaacttgcagtcatggcagaagatgaatgaggagcaggcacttcacatggctagagcaggagcaaaaaaaaggcaagggggcgtaccacacgcttttaaacaaccagatctcaagagagctctctcacgcaaggacagcatcaaagggatggtgctaaaccattcatgagaaactcatccccatcatccagtcacctccctccaggctccatctccaatactggagattactttcaacatgagattttggcagggacacagatccaaactatatcaaaaggtatcttactagaaatggttaggaattactgataacaggaccatatgctcgcagttgtttcaattgaggcttgcatattaatggaaaagtcaactgaagtgaggaatttaaaaattatatattgtaacattttgtttttagcttaaaacatgtaaatattgatatggtttgggtctgtgtccctgcccaaatctcatgttgaattgtaatcctcagtgttggaggtagggcttggtgggaggtgattagatcatgggggtggagttctcatgagacctaaaactgtgtagcacctcccccatttctttcttcctcctattcccgccatgaggtgcctccttcttcacctttctccacaaatataagttttcctgaggcttccccagaagctgagcagatgccagtatcatgcttcctgtacagcctacagaactgtaaggcatttaaaactcttttctttaattacacagtctcaggtattcctttaacagcaatgtgagaagggaccaataatatgcattcatttgccaatcttttgctggccattgtagtcgtgtgtgtgtgtgtgtgtgtgtgtatttgcatttgcaaagtatgtgagatattttaatacaggcatacagtgtgtaataatcacatcaaggtaaatggggtatctatctcctcaagcatttaccctttgtgttacatacaatccaattatacttttagttattttaaaatgtacaataaattcttgttgactgtagtcaccctgttgtgctatcaaacactagatcttattaattctactgaactatattttggtgcccattaaccatcctcactccccctgccactacccttctcagcctgtggtaaccatcattctactctatctccactagttcagttgttttaatttttagctcccacaattaagtgagaagatggaaagtttgtctttctgtgcctggcttatttcaccataatgacctccatgttgttgcaaatgacaggatatcattcttttttatgactgaataatactccattgtgtataagtaccacattttctttatccatctgttgatggacgtttaggttggttcccactgatttcctttcttttgggtatatgcttagcagtgggattgctgtatcatacagtaattctgtttttagtttttttgaggaacctccaaactgttctccgtagtggtcatactaacattcctaccaacactatatgatggttgccttttctctacatcctcaccagcatttattattgcttgtattttggataaaagccattttaactggggtgagatgatattgcatggtagttttgatttgcgtttctctgatgatcagtggtattgagcaccttttcatatacctgtttgccatctgtatgtcttcttttgagaaatgtctattcaggtcttttgcctatgtttaattggattatttgatttttttcctatatagttgttcgagctccttatacattctggttgttaatccctcatcagatgggtggtttgcaaatattttctcccattctatgggttgtctcttcactttgttgattgtttcccttactgtgcagaaactttttataacttgttgtgattccatttgtctgttttcactttaattacctgtgtttctcagaatatctttgcctagttcaatatcctggagagttctcccaatgttttcttttagcagtttcatagtttgaggtcctagatttaagtctttaatccattttgatttaattttcgtgtatggtgagagataggggtctggttttattcttctgcatatggatatccaattttctcagggccttatattaagagactgtcctttctcaaatgtatgttcttggcagctttgttggaaaatgaattcactgtaggatttgtttctgggttctgtattctcttccattggtctgtgtgtttgtttttataccagtatcatgctgatttggttactatagcactgtagtataatttaaagtcaggtaatgtgattcctctagttgtgttctttttgcttaggttagctttggctattctggatcttttgtggttccgtatgaatttaaggatttttttttttctattcctgtcaagaatgtcattggtattttgaaagggattgcattgaatctgcagattactttgggtagtgtggacattttaacaatattgattcttccaatctgtgaacatggagtatgtttccattttttaatgtcctcattaatttctttcatcactgtttcataatttttattgtagagacctttcacttctttggtgaagttcctagatgttttatttgtagttactgtaattgggattactttaaaaaaccttttttcagattggtcactggtggcatatagaaatgctactgatttttgtatgttgactttttatcctgcaactgtactgaatttaccagttctgatagttttttcatagagtctttaggtttttccaaacgtaagatgatgtctctgcagacaagcttaatttgacttcttcctttccaatttgtatgccctctttttctttctcctgttgaattgctccagctaggacttcctggtcagtatgttttacagagggaatgatgaatgctatttctttgtaggaccaaaaaattaaatgttgtgtaaagtaatagagcattatatgaccatatactttgctgtcagaagacatatttaaaagttggtcagttagcagatttctttaaagtaaaatctattcagaggtttttaaaaactcagaaaactttaccaatgttcagaaaatatttcttcaattggctgtggtgcttttggtttctgatggtggccagttattggcatgttgctctattgggaatgtttttggcttggctcttgccgcgtaatttagcatacttctctccctccctccttccctccctccctccctccctctttccttccttccctccttcccttcttccctctttccctcctgtcatcaaactcagaatgtttttcactgcttggtggtggtggtgaatccctaattctacatgcatagcttttgaaacttggctcctctttttctattccatgtaggagcataggatgttaatggtttctcagaatgatctgtatcaccttccgtgttttcagtgagaaataacaatgatggataaggctcaggaaagaacaactaacatagttcaagacacataataggcactgtacagataattacccaattcatgaactaaaaaaatcttcatgtttgataagtatactctatagtaagaccctctgatgctaactagaggtgaaaatatatggatggtcaaatggaaataagggtagagaaagagaagagattaactggtatttatttacaggttcatgaaattcaattttaaaatgattgataaggaaaagagttgatcacttagaaacacaagtgaattatttcggtattttccttataggtgacaatttttaatgtattgagatacaaactagtgtttagcccagtatttctcaatacttttttttcacttatattcccccaaggagcctttttaaaaattaacaccctgatttctttttttttaatttcaacttttattttagatacagggtgtacatatgtaggtttgttacatgggcatattatatgatgcttaggtctggggtatggattccatcacccaggtagtgagcatagtactcaataggtagttttccacccatgctttttccctcttccctctagtagtccacagtgtctatttttcccatgtttatgtcagtgtatgctcaatgtttagctcccacttataaatgaaaacatgtggtatttggttttctgttgctgtgttaattcacttaggattatggcttccagccgcctccatgttgctgcaaaggacatgatttcattcttttttatggctgcatattactccatggtgtatctgtaccacattttctttattcagtccaccattgatgggcccctaggtttattccatgtctttgttatcataaatagtatggtgatgaacatatgaatacatgtatccttttgtacaacaatttattttcctttggatatatacccagtaatgaattgctggatcaaatggtagctgttttaaattctttgagaaatctccaaactgctttccacagtggctaaactaccttcccactaacaatgtataagtgttcctttttctccacggcctcaccagcatctgttgttttttgactttttaataaaagccagcctgattggtgtgagatggtatctcattgtggttttgatttgtctctatctgatgattagtgatgatgagcattttttcatgtttgttggctgcttggatgtcatcttttgagaagtgtcagtgcatgtctttggccatttttttaatggggttgttttttgcttgtagatttgtgtaagtttcttacagattctggatattagacctttgtcagatgcacagtttgtgaatatgttctcccattctgttggttgtctgttttctctgtttataatttcctttgctgtgcagaagctgtttagtttaattaggtcccacttgtcaatttttgtttttgttgcagttgcttttcaggacttagccaaaaattctttgccaaggccaatgtcgagaagggtattttctaggttttcttctaggatttttaaagtttgagatcttacatttaaatctttactccatcttgagttaatttttttatacggttaaaaagtaaggatccagataaggctagccagttatcccagcaccttttatttaatagggattaacacccttttttgttaagcaccattccccctccatgaaattttaacaccacagatatgctgtgtatttgcctatgtactgtggcccttttgagggctacatcccacttaatatctaagtatttttctcttcccttccccaccaagaaccagtttgccctcttggaagtgatcttgcccgcattgagaatgcatggcttagtcctattttagttgtcagtaatgtgtgttacaggagttcacatggtcttctgaggtgcagcgtcagtgtgtaaaggaaagtgtctattccagcatgtttattttctattagcattctttgaaggtgtcagataaaaaaacatgcagagcagataagctgacacactataaataacatctgggtaaagtcttaaaatagcttgtggttcatcactgaatagttttcttaccaacgtttaaatatgctaaatacaattgcttaatagtaattactaagaaaagtttttctgtagcatataaatttgtgtgaatggtggtggtatacttaacactgttagtgatttggcttacatttgtcttcagttaaattttgataaaaaagaaggaacatgatgaagtggaaggcagtatcagaagacttaggttctggtaaaatgagagatcattctaaacacttgagtactgagcataagcaaataccagtgaagacagagtagggctacaggtgaaaagaagaggcaccagccagctgtatccagaacagcaactttaggtaggtcagttttgcttctccttcacttctttcatttgatgaaatgaataaatttagaatgactattaccatttaaacttatttgcctattaaaagagccactctgttgtgattgtttgttgtttaatatcatattctaagcaattaatttgtcaggcaacttttaggtaataagtttatttcgttaatttcatgtgtctatagatttccatgtcacaacttctttctattataaggtaaagggaatcagaactttattagtaacacttcaccatttcagggacatactctgcagaagtacacatgtcttcccagataattttgaccagcattttgttttcattttttgtttatgactctagggatgtctgatctagaccaaaacagcttcaccaagatttgtgtttaaacataaagctatgttattttcatctctgctttagacattcctatcttattcagatatgacccaaaatataagcccctctatgaagtgagctttcatgttttactccatccttccctcccccgtctaataatgcctatgctgccttttctttgcatcatttagaactccttccttgtgtccccactttcttcccaatttgtccacctttttttttttttttggccttcagaggccgtaattcttccttttgcccttccagtagggaatgtttattttgccacacactacccaactttgggcctagtaacttggccctgtcactattgcctggaaactattcttgtcctctcatgaaaacctgttctttatgaggcctatgatattgtaccacactttcctctattttgttattggcatccatggctgacatgtaccagatggttgcccactgttcatcaagaactctgacacttggctgatagtccttctttccagatcactttgtgcagtcatcttaagcagcccatacatctaacattttggccttccagttccttctcttattctctacctttatgtgttcttcttggctgtaccttgagccttgttagctaactgactctcctctctttctgagatcttcccattctgaccacaacttcatatcctttgatctctcatatccttattcagacttgtgctttaacttcgttgagaccactatatgtgtttgttttatacttccttttctcctatcagctccattctggccacatttcctcagctagtcagtcctgacttttctttctcactgtcactcttaacagccttgctccttttcattgtggctgctcagaaaatctactgtttaatccattgcctacttttggccctttcacacctggaatcttctgtggtagtacagaaaattagtcctatcacagatttaaggctttccactcagctgggcccccaaatatggtttgatagtccttttgcttttcttgggctagctcctttccccattttctttgatgattatgctggacttttatatctcaaatcctgtactccaattcaagccacccacctcacatatgcttgtaaatatgcttgaccgctgctttttataaaacatgaatgatcagctataaatgctcgatttcatctctccagcttgcatacttacctgcagtaattttcacctgtgggtcattttccctacctcattaagtgtattctgctgttcattaggggcacccttgcccgggatactgtgtcttaacttctctgtgatcttaatccaaaaattctctctgattacctttaaattctttttctgattccttcccctcaacttggaaatattagaaaggaaatagatgccttttttcctttatattatacacctgtgtatttcatacacatacacgtttttcctttttttaaaaaaagggctcttgtagcctcacttcttctacctgagtgaccatgcatcttggtgattcaagataatttcagtttatttctgtctgtttaggatccctttttagttttaaaacttcagtttagatggttggttatatggtcacactattcctcactgttccttttttacatggaatattatatactgtctttctcagctctttctcttcaatcaattgctatatggttattccttccccactgcctccactgaaactgttccagcaagagtaccaaagacaccaaattgctaaattccatgaacacttttactcttcataaattttggtctttctgcaacatttgcattgtgcgtgattcctttcttttcatcttcattaacctttttttttttttgacacagtctctctgtcgcccaggctggaatacagtggtacaatctcaatctcggctcactgcaacctttgcctcccaggttcaagcgattctccttcttcagcctcccaagtagctaggactacagacatgtgccactatgcccaactaatttttatatttttagtagagacgagggttcactatgttggccagggtggtctcgaactcctgacctcaggtgatccaccagcctcggcctcccaaagtgctgggattacagacatgagccaccgtgcctggcccatcttccttaacttttgtaacagtgctttaccatgagttttcttttcctctctagtagtctgtctttactgatcttccctggcttctctgcttttcttctctctgttcttaaaatattgatgtatcctaaaattctagtttattagttcttcacattcttttctattttcaattaatatgttctgcctgaagatttcactaccaattgtgtgtcagtaactcctgtgtctggaactctgttcccagccattctcctcagaccatttttctttttctttttcttcttcttcgttttttttttttttaagattgagtcttgctctgtcacctggtctggagtgcagtggcgtgatcttggctcactgtgacctctgcctcccaggttcaagtggttctcctgtcccagcctcccaagcagccagaattacaggcgcccaccatcatgcccggctaatttttgtatttttagtagagatggggttttgccatgttggccaggctgatctcaaactcctcatctcaggagatccacccaccttggcctcccaaagtgctgggattacaggcgtgagccactgtgcccggccaccagaccatttttcatcaatcggttgcacatcttttcttcagctgtctcgcagcccccttgaactcaatctggcaacacccttatcccaaacttactccccctcctgagatattctttatcttggttaatggtatctcctttcatgaaatctgaaagctgagagtcagccattctcatcctttattccccatatagtcttcaggtcctatctctgccttctaaataagatctagctctatccctttctattttcagtgctattccttagttcagggtatataacattcttttctccaggcttctctctatcttgtcagttcttcaagtttctgattttctaaaatgcacaagtgatcttgtcagctattgtttaaaacctttgtttactcattgcctggatgaagaagtctgtatgtgtgtgttgaactggttatgtctgttgatctgatgctccagcctgccttcatagctgtgcctgttgcttcattgcacacttctgagctagggtcactaagaattacagcagatgctgttttcttcttccagagaagagaatgcccttctcccctgcccatcacttgaagctgaaacttgaagtatcacttcctactcaataggccaaggccatacacaatgatttagataatggactgaaagactgcctggaatctaaacccagctttgacacatttactagctagctgtgttattttgggcaggttatttattatttattgtatgtcgtttatgatttttcttcagtaaactcttacctgacctgcttatgcacacctcttatctagattgtaagtttgcctcagtcatagcatgtatcacgttgataaaatcatttgtctgtcttttctgttagactgagcatttcatggtatggctatctttttcttttcatgctgaatgaacgcttttaagtcagtgaatgaatacataaagaatgtgacaagagaaatattcccagtacctggcattatgctgtgagtgtggtaaatgtttaatatgtctgttttaggccggacatggtggctcatgcctgtaatcccaccactttgggagaccaaggcaggcacatcacgaggtcaagagatcaagaacatcctggccaacatggtgaaaccctgtgtctactaaaaatacaaaaattagttggacatggtggcatgtgcctgtagtcccagctactcaggaggctgaggcaggagaattgcttgaacccgggaggtggaggtttcagtgagctgagattgtgctaccgcactccagcctggtgacagagcgagactctgtctcaaaaaaaaaaaaaaatctgttttaatgagatgtccataatgtaatgtaacttgatgaatatagtattactttttttagtagtctttctcttttaaaaattgagctataatttgcatataataaaatgtataatttattttgaaaaatatatgcatctacttaaccacaatggcaataaagataaaggacattttgatcactctggaaagttccttagtatacatttctcctccatttccctcactccctatccctgatcactgctttgatttctatcattgtccattagttttacctcttctacacataaatagaattatcagtaggtgccccattgtgtctggattctttcatgcaacagtattttttgagttcatctttgttaccgtgggatcagtaattcattccttggtatttctgagtagtatttcaatgtaggaatatatcgtagtttgtttatccattctctgtggcatttggggttaaataaaactgcagtgaacatttctgtgagagtatttgtgaacatttattttcatttttattggataaatttcctgtgagaggaattgctgaatcatagctgtcaagcaatattccaaaaatggttgtacacttttacactcctactaacaatgtatgggagttccaagggcttcatattattaccaaccactggtgttattagtcgtgtcagttttagccattttaatgcttgtggccattttttttgtttgtttgtatgtttttgttttgttttgaaacgatgtttcactcttgttgcccaggctggagtgcagtgatgcaatcgtggctcactgcaacctccacctcccgagttcaagcaattctcctgcctcagcctcccaagtagctgggattacaggcatgcaccaccacacctggctaattttatatttttttttagtagagttgggatttctcccatgtaggtcagactggtcttgaactcttgacctcaggtgacccacctgccttggcctcccaaagtgctgggattacaggcgtgagccaccgcacccggccgtggccatgttttaatttgcatttctctgatgattaacactgttaattatcatttccacatactgattatccattcatatatctccttttgtgaaatgcccaagttgtacctgtacccttttaaaattggattgtttattgcttactgctttgtgggggttgttttggctgtttataagtttttatcagatatgtgcattgcaaatattgtcttccaatctctggactggtcttttttttttttttttagatgttcaggtttaaaatttttataaagtccaacttaccaattttttattttatgcatagtaatttttgtatcttgtttaagaactctttgcctaacctaaggtggcataatcacctgtgtttctttatagaagctttataattttacctttttcataaagtcctattttaaattaacaaagaatacaaattcatggctgggcgcggtggctcacacctgtaatcccagcactttgggaggccgaggcaggcagatcatgaggtcaggagatgaagaccatcctggctaacaaggtgaaaccctgtctctactaaaaatacaaaaaattagccggacgtggtggctggcacctgtagtcccagctactcgggaggctgaggcaggagaatggcgcgaaccggagaggcggagcttgcagtgagccaagatcgcgccactgcactccagcctgtgcaacagagcgaaactcttgtctccaaaaaaaaagaatacaaactcacaaataagtttggtaataaagccttttttattattgctgagatatacttcacattccataaaatctactcttctgaagtgcgtgattcagtgttttaggttggtttggttgttgctgtttttgtttgtggtatatttacaaagttttttggtgaccatcaccactgtctaattccagaacatttcatctccccagaaagaaacctcgtacacattgcagtcattatggatttgcctattctggacaagtcatgtaaatggaatcatcatacgtagcctttttgtgtttggctttttttccttaacctaatgttttcaaggttcacccatgtagtatgcattctttttatggccaaatactccattgtattgacataccacattttgtttattcatgagttcatggacatgccttttaactttttaaagaaagcacatttgttttttcttcttctttttttttttttcagattgtggaatccattcactcctgaaatatttagtgcctatgatattacatttacttagggatatgtagttttactcatttaccaagcttgggactggggattcaaagatgaataagatcttccctcagggagctttttttttctagtggaagaaacaggcatgtgaacagataaattacaagacaatctgatgaagatactattagatttataatctaaggtaaagtgtaatcccaaaactcagtagctaactctgcttggaggaatgaataagaactttttagagtaggtgacatttggagctagatctttaagaataaataagagtttgccaggagagtgagaatatttcaggtagaagacatggcttgtacaaaggcacggaattgatatatcttggcacctttgagaagctcagtatgataattatgggtaacatgaaaagagtctggaaaggcagatctgggccagcccatgaagagctttacatctaagcaaaggaacttggattttattctttgggtgtctgggagaccaaaggagtttggctaaatgaaatggcatcactgcttatataaggtctgttagaagaccacatatccagtgaagcccaacttttcattttctccagaaaattttgtccatattaggcaccttttaaaaaatgaatgtattggccaggtgtggtagctcgtgctacctgtaatcccagcagattacttgaggccaggagtttgagaccagcctggccaacatggcaaaaccctatttctactaaaagtacaaaaactagctgggcgtggtggcacatacctgtaatctcagctaattgggaggctggggcacaagagtctctcaagctcaggaggcagaagttgcagtgagccgagatcatgctactgcaccccagcctgagagacagagagagactctgtctaaaaaaaaaaaaaaagaaagaagggaagaatatacctcccctcaacccaaaccattctctcactaccaccttctatcatagtctattgacttacctgaagttatcaagttaatttatttctttgcttagctactgttgtatctttcttccagagaggttcttttttatcttgccctaaccactgcttggcacatagtaggtacatatctgtatttaatgattaaatgagctattctacctctaatatcttaaactctaggatcctgccctgtgattatagcctcctattccttgtcctctctgcctcccactctccttctttgcgttttttcagcactttgaccgtactgcctccattttcttttgttattgttgtcccatcactacgttccctaactagcttagatcaattcagctgtattcttgtcagtcttatactccatttccatagccttccttttcttttgttccgtatacctatcaaaacccttaccttggcacagtctgatccaaattcaagcacatgaggtcctactggagaaaatcacctaactgtagtttgcagccagtacatcgtcctagttcatagtcttcaacgttatgtagatgtacagcattgcctggaaatcttatgttttctattcaacatacactcatgcaccagtgaatgatggggctctgttctgaggaatgcattgttaggcaattttgttgttatgcaaacatcacacagtgtacttacacacactagatggtatagtctactacacacctaggctgtatgataatagcctattgctcttggggtacaaacctgtacagcgtattgctgtgctgaacactgtagggagttgtaacacaatggtaagtatttgtgtatctaaacatatccaaacatagaaaaggtacagcaaaaatatggtataaaagataaaaagtaggccgggcacagtggctcacacctgtaatcccagcactttgggaggccgaggcaggcggatcacctgaggtcaggagtttgagacaaacctggccaacatggtggaaccacatgtctactaaaaatataaaaattagccaggcatgatggcacacgcctgtaaacccagcaactggggaggctgaggcaggagaatcacttgaacccggaagcggaggttgcagtgagccaaaatcgcaccactgcacttcagcctggacgatagactgagactgcatctcaaaaaaaaaaaaaaaaaagataaaaagtggtacacttatatagggcgatccattcacttactgtgaatggattttgcgagactggaagttactgggtgagtcagtgagtgagtagtcagtgactgtgaaaacctaggacagtgttgtacactactgtaggttttataaataagcactgtatacttaggctacattaaatttattaaaaatgtttttcttcaataataaaattaaccttagcttattgtaagttttttccttattaactttttaattttaaaatcttttgaactgttgtgtagtaacactttgtttaggacacaaacattgtacagctgtacaaacatattttctttctttatgtgcttattctaagcttttttcagttaaatttttttaacctttttgttaaaaactgagacacaaacacaccattaacgtaggcctacatagagtcaggattatcagtaccactatcttccatctccacatcttgtcccactgtaaggtctttaggagtaataacacacatggaactgtcatctcttatgctaataatgcctttttctggaatacctcctgaaggatctgcttaaggctgttttacagttaatttttttataagtaggggtacactttaaaataatgataaaagtatagtaaattcataaaccagtaacatagtctttttttttttttttctttttttttttttgagacagagtctcactctgtcgcccaggctggagtgcagtggcgcaatcttggctcactgcaacctctgcttcctgggttcaagagattctcctgcctcagcctcctgagtagctgggactacaggtgcatgccaccacgcctggctaatttttgttttgtacttttagtagagacagggtttcaccatgttagtcaggatggtctcaatctcctgaccttgtgatctgcccacctcagcctcccaaagtgctgggattacaggtgtgagccactgcacccggccaacatagtcttttattatcaagtattgcgtattttacataattgtatccgtaataccttcatatgactgacagtgcagtaggtttgtttacatgagcatcaccacagacatgtgcgtaatactttgtgctaccatgtgatgacagctacagtgttactaggcaataggagtttttgaactgcattataatcttatgagaccaccatcatatatacagtttgttgttgaccaaaacgttatatggtgtatgactattttatttcccaacaactgctgttctcttttttactctctactatccccacatcttaccacctttcccttacttgccttcacctgcttgacaaagaaaatggatctcttagatatggattccctccgcaccttaccttcatatctacaaatctttctgcacccatgtacatctttatctcctttctttccatcctagtgtgagagttattttctttgagctaatgctttcacttgtgctctatatcctgttctctacttcctcagaggccttgtatttctcctccacctcagattctgtcatcagcatatatgtaaacatgttcagatgtgtcattttttaaatagcagaatatctgtcactctcactctacttgaggtttcattttctttctctttttttcttaccagttgtctgttttctctgctcctattcactcttcagtcccctagaatctgacctctgtactctttattccttagaactgtccttgctatggtcaccaatgacttttgcttctctagtggatactttttagtgactcccgtggtagttctttttcttttctaaaatgttctttttcactggtttccgtgagacccctttccctattttcatcctttgtcggtctgttcctttacagtttcctttgcatggtatgaaagcacaatttagtagaaacagttcagtgtgatgcaagtcattgtggtttaaggaggagtctctggtttagcctggatgtctaggtaggtctttatcatttactagcacacagacatttactaaagattagacagaagaaaaccaaaattatattttctgtcaagaatttgggatgaagatgttttatgttgccggttacacatagtttcacatacgttgacagagttagggttaaggctctcttaaggaagtgaagaattgtgcctggtggacaacccacataatggcagaaaatattcacaaactgtacatttgacaaaagtctaatatacagaatctataaggaatttaaacaatttaacaagcaaaaaacaaccccaataaacagtgggcaaaatatatgaacagacagttctcaaaagaagacatccaaccagccaacaaacatgaaaaaatgctcatcatcactagtcatcagagaaagacaaatcaaaactacaatgagataccatctcacatcaatcagattggctattattaaaaagtcaaaaaataacagatgcaggtgaggctgtggagaaaagggaatacttacacaccattgatgggaatgtaaagtagtttagccactgtggaaagcagtttgaagatttgtcagagaactttgaaagagagctaccatttgactcagcgatcacattactgagtatatatccaaaagaaaacaaagctaccaaaaagacacatgcacttgtatgttcattgcagcattgttcacaatagcaaagacatggaatcaacctagggagggtcccatcagtggtggattggataaagaaaatgtggtatgtatgtactatggaatactactcagccataaaaaagaatgaaatccagtcctttgcagcaacacgaaggcagctggaggccgttatcctgagtgaattaatgcaggaacagaaaatcagataccgcatgttctcagttataagtgggagctaaacattggatactcatggacataaggatggcaacaatagacactgaggactagtagagcaaggcaggagggagaggggcaagagttgaaaaacttaatagttgggttgtatgctctctctctgggtgacagcatcagttgtaccctaaacctcagcatcatgagatatatgcatgtaacttgcaccacatgtaccccctgaatttaaaagttgaaattataaaaaataaatagcctgttgtaactaatgagaaacagctcctggcatgtctgttctcccatttcttagcagctgtcctgtcatttgtattgtgttcagtttaccagatatttgtcatttggtttgttttctctttcccttcttctctgcctcacccaccccattaatcttttaaattgtggaatgtaatggatatgtaaaagtacataaaacaaatgtgatgtactgtttaaatacatactgtaaagtaaagatccatgtcagcactatctggtcaaaacagagaacatagtcattgcgccagttcacctgttacgtcccttttctggttacacttttccctccaccttactcctagaaaattactctccaaactctggaggtcattacttacattgttttctttatagtttaaaaactaagtatgaacccctagacaaacgttgcacgtttttaacctctatataagtggaaaaatacagtagctatctgtgtgtgtgtgagtcattgtctgacttcttttgcttgtggtctgtccatttttgcctatagctgaaattcattcattgtgataaatttttccgaagtggaattgctgggatcaacttcatttttactgggatttgttttagtgtatgtgtgtgtgtatgtatacacacacatatatatacacatactaaatttatatataaatttttaaaaaactgtgttctaaagagattgtgccaatttatttattttttatttttattttttgagacagggtctcattctgtcacccagggtggagtacagtggcatgatcacagcttgctatagccccgaccttccaggctcaagcgatcctcccactgcagcctcttaagtagctaggactacagatgtgtgctgccatgcctggcgaattttgttaactttttgtagagacagggtctcactatgttgtccaggctggtcttgaactcctgggctcaagtgatcctcctaccttgaactcccaaagtcctgggattacaggtgtgagccaccacacccaggagttgtgccagtttgtattcataccagcagcatatgagaattttcactatacttgattgctctccacttttttttttttggcttgttttttgtcttgtaagtcctttgctattatttaaactgaaaaccatttcatttttcacatttccatattggagaaatagtaacaaaactacttaaaaatatgggttaaccttattatgtcatcttggtccatgacatgaaatcagtacatattttcattatgttaaatatacttatgtatatttattaagttaatgctttcaaaaatcacgagataactatattttatatatactgatagttaccagtattatttttaaataaagataattttgttttgcctttatttttactttaaagttttcagccatgaactggtgatatttaatataaagatatatatattatttaacaataagataattttgggctttattatatagatttatttctaataatgtatatggaatatttattaatgtaactctaatggatctttacttttccttacttttctttcaagttggcctttaccagagtttgatccaagccagattcgactgattgtatatcaagactgtgaaagacgagggagaaatgttttgtttgactccagtgttaagagaagaaatgaggacatatcagtatcggtgagcatcattattgatttggttgacttttaatgttgaacattttgataattccagtattatcaaactggataattggggctgagggagaaggaaatgactggatattggggctgagggagaaggaaatgtttggtgaatctaacattttgatttgaatagctgaggagtggtttgatgcttaggagtcatagaattggagacagtcaagcagacagttgaaatccaaggctaacttaacaaatgtgataagcatgacttctttgtatttagactgctgacaacagctcagcagaacttggctgaggctgatttttttttaattatctcgattattttttattactttttcagcaaacatttattgaagtttttttttttgtatttgatagtatcctattgaatttcaacatatgcctctcccttactcttaattttgattaatgctattcattttgtgtttgttcagcttttctcttttatgttaaacagccctgtaagaatccactcatgctgttttttgaactctccctgcataccttttctgggacgatgcttcattagtctcattaatttctctcctgcgatgtattccttcatccctctcagcttttctctttgcttggaaacattcacaaagctgctaaaataatttttctttactttttccttcaggtttgtgtttgtctagttcaggctactataacaaaatactgtagactgggtgccttaaacaagaaactttggtttctcccagcatatttgagttttttgtgagggctgtcttctgggttgcagactgctgacttctcactctaccctttacatggtggaaagaaggcaagagaactcttcaagtcctttttataaggacaccaaccccattcatgaggacttcgttcttatgacctaatcacctcctaaagtccccacctcctaatatcgcatggtgggttaggacgacatatgaattttgaggagagacacacattcagtccatagcagtgtccttctctgtcttttcccatccctggcctcttcgtccctctcagtcatctttcttggtgtctgttggtgtctctcattttccctttgtctctctatcactcaggctctctagagtgtctcttctcagtctctctgttggtctctccttggtcttctctgtctctcggtgtctcagtagtaatacattgactctcttctcaaactatccagttattactcaactttctgaaatttgcctataaacctactcttctttttattataaaacttttctagaaactcatcagtgtctagaaatcaaacattgttgactacttccagtctcatttattttattatgcctttatcctatatactatctcccttaattgaaaatttatcctccttcagagtttatcacaactttatgaatcctttctgattttctctaggtagatttattttctcctccatcagaattctcataattctttactcatattcatagccttctatatcatagctgtattcgtatgtgtatttgttactagactgggaaaaaaaccttaaagtaaaaaattgtcctgttactcacctttatttcctacactgcacattgccttacatgtggtaagtactcaggacacattttgatcgattgtaattactgttaggaagtttattttcaaaatcctgtaaatactctcctgaagattttatgtcttccttttgaacactactgtacatattgaaatactcattgtttgtcctcggttctatatatggaaagaaggacattgtgctgtaaatttttttaaactttctacattataatttgggttcatacataataaagacattatgtttaagcattaacagtttgctgtatgaaagtaaattattcagctttgctgtatttgtacaatattctattttgctgtggtaaatgttgaagtaacttctcatgttcttctttcttagttttaaaacacttttcttagtttaaaacaatttacaagagagaataaggactataaatattattttgaccatttaatataccaaagccttttcttttttgagacagggttttttgttgtctgtttgttttcttgagacagggtctcgctctctcgcccaggctggagtgcagtggcacaatctcagctcactgaaacctctgcctccaggctcaagcagttctcgtgcctcagccttgcgagtagctgggattacaggtgtgcaccaccacacctgggtaatttttacatttttagtagaaatggggtttcgccttgttggccagactggtctcgaacttctgggctcaagcgaaccgcctgctttggcctcataaagtgctgggattaccagcgggagccactttgcctggcctatttaccaaaacttttattgaaaacattctttttaaaaaaattagaacataatgtcgccatgagttataaacagaaagtcaagctttagaatgtgagccttgcaaaattgttttactctgttcgctttatcaaaaaagaaattaaaacattttctcatttggaagcagcgtccatctgtcctgctatgttgcccaggctggacttgaattcctgggatcacgcagtcctccctcttcaggctacttgggacagtttgttatcagcctgaatctgaatttttgaaaaatatcatttgaaaattgccaagtaggagtagaagatagtaatatttgggctcactcaatatgtttgagtgtatttaattaaatcaaaatcctattgattgtttactgtgaagctatttcagcgttaaaaaatagtcattgtaaaaatacttactggagtccttttaaatgtgtaagacacatggcagttttccttgtaaagattatagatgatcataattcactttgagtaccttttatctggagtgtgagagaaggcaatatttcacagtggaatattgatccatttctgcgtttggttgaaccaaagaattgtcaatgaagaatataacagcagtttattaatataagcagatcatttttgtatttccatgcaaagcaaacattgtgtatgtagagtatatttaatgggttttgggagaaaattaggaagctatgtattttattacattttaaattctatacaaagtgaactacataaatgctttgattatgcttcagaaaccaaagtactttgcatgctcaaatagtgtcttatgtaagttgaaataaaattgttaatcagtgtatagcttcctcagaactcattttttcagatctgttatatattttatgaaaaatgactgttgaattataaaacccaattaaagtgaatatgtgtagtgatcttaaagaagtgttaccggaaaggggtctggatccagaccccaagagagggttcttggatcttgagcaagaaagaattcagggcaaatccgtaaagtgaaagcaagtttattaagaaagtaaaggaataaagaatggcaactccataggcagaccagccccgaggcctgctgattgtgggtttttatggttatttcttgattgtatgctaaacaaggggtggattattcatgcctcccattttttacaccatatactgtaatttactgatgttgccagtggcatttgtaaactgtcatggagctggtgggagtgtagtagtgaggatgaccagaggtcactcttgtcgccatcttggttttggtgcattttagccagcttctttactgcaggctttttcatcatcaaggtttttatgacttatgtcttgtgccaacctcctatctcctcctgtgacttagaatgctttaaccatctgggaatgcagcccagtcggtctgagccttattttacccagcccctattcaagatggagttgctctggttcaacatctctgacagaagaaccttcccgtggtagaaaaatatattgagatatggtttcgatatgaacactaacatagccaaatggatccattctgattttatcacactattatccttatcctagacattgtttttatgtcaacaacagtgcaatgctatttcatgagttcccagttaagttatatgaccattcacatgtatcagctttcactgattctaaacaaggataaagttgtacatcagtaaattcacataactttggaaagatgattacagattttaagacatgagaaacactccgaagcatcgtacagtgctaattgaatagttgagtcttatttatgatatcacatttgcacataggatttggttagataattggatttaggttaatatacagaaatcagtaagctcaatatatgcaaatagcttccagtttgaacacataaaagtgaaacattcatttaaaatagaaattaaaatgacaaagttgcctatgcatacacttaacaaaatctgtaagtttagaactttaaaagtcttcttaagggacgtaaaaacgtaccttaacaaatggaaaggctaaacatattccatggcagtagtcaatgttataaagttgtccaaagtgctttgtaaaataatgctatcacagaaacaatgttatccttatttttgtgtgtttggggtgggggtagtgtctggaactaaatagtggattctaaagttcaaatggaaaaaaattagcaatgattggttggaaaactgaaaaagaagggcagtgaggatgagccagtcctatcacatttgaaaatatactgcacagtctcagtatctaaaacagtgtttttttttttttttttttttttttgagctggagtctcactctgtcacccaggctggagagcagcggcgcaatctcagctcactacaagctccgcctcctgggttcacgccattctcctgcctcagcctcccgagtagctgggactacaggcaccggccaccacgcccggctaacgttttgtatttttagtagagacagggtttcactgtgttagccagggtgttctccatctcctgacctcgtgatccacccacctcggcctcccaaagtgctgggattacgggcgtgagccaccacgcctggccaaacagtgtgttattgacacataaataggcaatagactaatggaacaaaatagaggatcagaaatacatccaaatacgttcaggaattttggtatatgattaaggcatcatcttaaatggtgttgagacaattagccatgtggaagaaagattaatttagactcatactgttactacttactattattattattttaaagatggcgtcttactgttttatccaggctggtctcaaactcttgggctcaagcatgagtcactgtgcccagccttaatttggattcatatcttacagtgtacatcaggatgaaaccaagtatatcaaacatttaaatataaaaatataaaactataacattacaaaagaaaaaatgagggagttcctatatatctgtggagtggaaaaggtatctctaggctgggtgcagtggctcacgcctgtaaacccagcactttgggaggtcaacatgggtgaattacttgaggccaggtgtttgagaccagtctggccaacataggaagaccccgtctctacagaaaacataaaaattagctgggtgtggtgctgagtgtctgtagtcccagctactgggagactgaggcagaagaatcacttgagcccaggaagtggaggttgcaatgagccaggatcacgccactgcactctaccctaagtgacaaagcaagaccctctccccgctggccaaaaaaaaaaaaaaggccggatgcagtggctcatgcctgtaatcccacactttgggaggctgaaaggctgaggagggtggatcacatgaggtcgggagttcaagaccagcctggccaacgtggtgaaaccccgtctctactaaaaaaaaaagtacaaaaattagccgggtgtggtggcacgtgcctgtagtttcatctactagggaggctgagacacgagaattgcttgatcccaggaggcggtggctacagtgagccaagattgcagtcatgccactgcactccagcctgggcaacagagtgagactctgtctcaagcaaagatatttctagctatgagttaaaattcagaagccataaagtaaaagattgacaaatttgacagccaattttttttcaacttgcatgataaaacagaaaacaacaccataaggaaagttaaaagacagatggcaacctgagaaaacactttgacaatttaaaatgccaagtgttaatataaagagttcctagaaatcaagaaccactcagtagataattgagtgaaggacaagagctgagcgttgatatacaaattgatatgacacgtttaataaaatcatacgtttataagatcctctcccttatccataattaagaaaatgaaaatcaaaactatactgaagctgggcatggtgaggtgagaggattgcttgagctcaggaatttgaggccagcctgggcaatatggtgagaactcaactcttaaaaaaaagaaaagcaaaaaaacctatactgagatttcaggtctttccttttctaatgacaaaaactaatgtctgctgatctgaggtggaacagtttcatcctgaaaccatatccccactaccctgccccagtctgcagaaaaattgtcttgcacgaaactggtgcctggtgccaaaaaggttggcaaccgctgttaagcactagggaatacaggtgaataaaagaagacatagtccttttcctcatggaactaagaatctaacaggagaaagagacagttaacagataattacacaaatatgtgtaatgaaatgtgtattccaagtatgtctaataaaagtaataatgatagcagcagctaactcacgttagcacttactatctttacatgtaaagagtaaatatatgtaaaacagaagagtactaccattattattccgatttatagataaagaggttaaaggatgacaatgtttaagtgaattgccatgaaaggacttcatttagtctagggagatcaagaaagtgatattttaagcttagactatgggggaaaaatgcgttaagagttaaggtgaaagaggaagcacttgagagagctggaaagacattccaggctgaggtaaccctgtatgtccaatctctgaaacaaaagtttgctagaggaagaaaagggacatacttcagttccaggactaaagcataaaaacacacctaaaagtgtgtacaaaaggatgcacatacacacacatactattctcccatcagctcctcagctgttgtttctctactccctcccatcttgaagtcgtgacttttctgaaagcaaacagcagcaactacagtggcagatggtcctgtaatgaggggacaaggtgcagtcaacaacaatccctcatgtaagcacaggacttctataagcaggaattgtaggaaaaagggttcaatttcttattattttactttgttatctcagagaagtgatgctgtactttatgtctagcccacaaaaacaaataccttcgaattatgcaaaaaaagttataaatattactgaaaaatacaactggctttctataactaggttataatttttattaactttttgaaacaatcacaaataagttgcaagttcaatacaaagaactttcgcttttctgaaccgaataagagtaaactgcctacttgatatcccatcagctttgaatacgtcaatgtgtatttcctaaaaatatgaacattcttctacgtaaccacaatacagcaaaaattcaggaaatcattgatatattatagccaaataatcctcagatcccattaaaacttggcaagttgtcaaaataacatcctacagaacaaaagaatccagttgagaatcttgcattgcatttatttgttgtatctctttagagatagatctctcccatgcacagttcacaataggattcgaactcctatgaggatctaatgctgaggctgatgtgacaggaggtggagtgcaggcggtaatgctcacttgcccactgctcacctcttgccatgtggcctggttcctaacaggccatggactggtactggtctgcagccaccctctggcttagaacgcgtagtacttaaatacttttgttgactgatgaaatggtggttcgtgatagtggataagtcaagccaactgggttttgtctataagtagataacagatttactagctcttgtaaccttggtgaagttatttaacctgtttgagcttcacgtttctcatctgtaaaatagcatcgataatacctaccatgcttagtattagagaaaatgtacattaaggcctggcattttgttggtgatcaataagtaataaggttattaagatgtggcgaaggatgccaatagtaaaaatacccgtatttttatcaagagttgaaacatacatggaaatacctagtgaagtgcctgacttcaattatgttagcccctcatgttaactgttttctaataacaattataacgaggttgaatgcagtggctcacacctgtaatcccagccagggattactttgggaggccaaggtgggaggattactttagcccaggagtttgacaccagcctaggcaacataatgagacctcatctctacaaaaagtaaaattagctggatgtggtggcatacgcctgtagtcccagctctgtggagatagctaggatattataactattatatataatatgtattatacatgtgtgtatataaaatacacacacacacacacacacacattcccttaagtgttgttaggtagggtttttcttccccttaaacaaataacaaattaaggtatagagaggtcagttaacttgctcaaggatacaggttttgaactcacatctagttcttctaatatacatattttatacgtatatatacatatatatgtgcatatatacgtatatacgtatacatatataaatatgtgtatatgtatacatatataaatacgtgtatatgtatacatatataaatatgtgtatatctatatacatgtatataaatacgtatatatgtatatacgtatatatacatattttatacgtatatatacatatatacgtatgtgtgtatatatataaaaatatatatataaaatactttaagttctagggtacatgtgcacaatgtgcaggtttgttacatatgtatacatgtcccatgttggtgtgctgcacccattaactcgtcatttacatgaggtatatctcctaatgctgttcctccccgctcccccgaccccacagcaggccctggtgtgtgatgttccccttcgtgtgtccaagtgttctcattgttcaattcctacctatgagtgagaacatgcagtgtttggttttttgtccttgcgatagtttgctgagaatgatggtttccagcttcatccgtgtccctacaaaggacatgaactcatccttttttatggctgcatagtattccatggtgtatatgtgccacattttcttaatccagtctatcattgttggacatttgggttggttccaagtctttgctattgtgagtagtgctgcaataaacatacgtgtgcatgtgtctttatagcagcatgatttatattcctttgggtatatacccagtaatgggattgctaggtcaaatggtatttctagttgtagatccctgagaaatcgccacactgtcttccacaatggttgaactagtttacagtcccaccaacagtgtaaaagcattcctatttctccacatcctctccagcccttgttgtttcctgactttttaatgatcgccattctaactggtgtgagatatctcattgtggttttgatttgcatctctctgatggccagtgatgatgagcattttttcatgtgtctgttggctgcataaatgtcttcttttgagaggtgtctgttcatatccttcgcctactttttgatggggttgtttgttttttttcttgtaaatttgtttgagttctttgtagattctggatattagccctttgtcagatgagtaggttgcaaaaattttctcccattctgtaggttgcctgttcactctgatggtagtttcttttgctgtgccaaatctctttagtttaattagatcccatttgtcaattttggcttttgttgccattgcttttggtgatgtagacatgattaaaagaactagagaagcaagagcaaacaaattgaaaaagctagcagaaggcaagaaataactaagatcagagcagaactgaaggagatagagacacaaaaaacccttcaaaaaatccatgaatccaggagctggttttttgaaaagatcaacaaaattgataaaccgctagcacgactaataagaaaagagagaagaatcaaatagacgcaataaaaaatgataaaggggatatcaccaccgatcccgcagaaatacaaactaccatcagagcatactataaacacctctacgcaaataaactagaaaatctagaagaaatggataaattcctcaacacatacatcctcccaagactaaaccaggaagaagttgagtctctgaatagaccagtaacaggctctgaaattgaggtaataattaatagcttaccaatcaaaaaaagtccaggaccagacagattcacagccgaattctaccagaggtagaaggaggagctggtaccattccttctgaaactattccaatcaatagaaaaagagggaatcctccctaactcattttatgaggccagcatcatcctgataccaaagcctggcagagacacaacaaaaaaagagaattgtagaccaatatccctgatgaatattgatgcagaaatcctcaataaaatactggcaaaccaaatccagcagcacatcaaaaagcttatccaccatgatcaagtgggcttcatccctgggatgcaaggctggtttaacatacgcaaatcaataaatgtaatccagcatataaacagaaccaaagacaaaaaccacgtgattatctcaatagatgcagaaaaggcctttgacaaaattcaacagcccttcatgctaaaaactctcaataaattaggtattgatgggacatatctcaaaataataagagctatatatgacagacccacagccaaaatcatactgaatggacaaaaactggaagcattccctttgaaaactggcacaaaacaaggatgccctctctcaccactcctgttcaacatagtgttggaagttgtggccagggcaatcaggcaggagaaagaaataaagggtattcatttaggaaaagaggaagttaaattgtccctgtttgcagatgacatgattgtgtatctagaacacccctcgtctcagcccaaaatctccttaagctgataaggaacttcagcaaagtctcaggatacaaaatcaatgtgcaaaaatcacaagcattcttatacaccaataacagacaaacagagagccaaatcatgagtgaactcccattcacaattgcttcaaagagaataaaatacctaggaatccaacttacaagggatgtgaaggacctcttcaaggagaactacaaaccactgctcaacgaaataaaagaggacacaaacaaatggaagaacattccatgctcatggatagaaagaatcaatatcgtgaaaatagccatactgcccaaggtaatttatagattcagtgccatccccatcaagctatcaatgactttcttcacagaattggaaaaaactactttcaagttcatatggaaccaaaaaagagcccacattgccaagtcaatcctaagccaaaagaacaaagctggaggcatcatgctacctgacttcaaactatactataaggctacagtaaccaaaacagcatggtgctggtaccaaacagagatacagaccaatggaacagtaaagagccctcagaaataataccacacatcaacaactatctgatctttgacaaacctgacaaaaacaagcaatggggaaaggattccctgtttaacaaatggtgctgggaaaactggctagccatatgtagaaagctgaaactggatcccttccttacaccttatacaaaaattaattcaagatggattaaagacttaaatgttagacctaaaaccataaaaaccctagaagaaaacctaggcaataccattcaggacataggcatggccaaggacctcatgttgaactcatatctagttctaaagcttttattctttttactttaaatttttggttagagataactggagactagtacatgtaatttttaacaatgcctttggtgatgttggtaactagaaaacattcagtcttcagtaaatgtgactttagtcagattatttgttctaaaaacctacctgaggtttgttaaatgaaagaatggacatactggtaactgtgataaagcactggaatacttttaggaatatcacagatgttggtggattgtaactttggtagttgtgagcagtgaaagatgtagagaagctgttggggaggaaaaagagaaagaggaattaaaaagaaatacatttttcttctacactagactgcacaaccatctggtcctaagttcattctctcattaaaattttatttattacattagtatattctcatttcgaaagaataaacatatgtatagttaaatctgaaagtctcatttgcatttctcctttcatccctgcatttctccccagaaaaataggttattttttataacagtgttacttacattaacttgggtttattgttgtatttaaatgaatgaataagtattttttacatggtctcagttttgatttctaatatgggaaaatattgataaatataacccatgtacacaaaagactcttgggatcctcgataacttgtaagaacattaagggttgttttgtttgtttgggtttttttttgtttttttttttgaaacagagtctcactctgtcacccaggctggagtgcagtggtgcagtctcagctcacttcccaggttcaaaagattcttgtgcctcatcctcccaagaagctgggattacaggcatgtgccaccatgcccagctaatttttgtctttttagtagagacagggtttctccctgttggtcgggctggtcttgaactcctggtgtcaagtgatccacctcctcagcttcccaaagtgctggaattacaggtatgagccaccaagccctgcccataaaggggttttgagaccaaataatttgaaaactactgcaatatattattacatcggtattaatgaacatcgtataggccgtggtaatctagaaaattctcaggatataataatgttggccagaaatacaaaccccacaaattttattatagttatgagacaaagaatagaaaatagtactggagaaaatacagcaaaatgccaatagccatattaatgttgtattttgagttatttcattcttggtttttccaaaggtttttatactttgatgaaatttgtatatggttaaaaatctgttaaaacatgagtggaaatatctgttatttcagaaactctgcagtgatgctcaagttaaagtctttgggaaatgctgccaactgaaacctggaggagacagttcttcctctttagatagttctgtgacttcatcttctgatataaaagaccagtgtcttaagtaccaggtaagatcattgatgtcatgtatttattcattcatttataattagttttgaacatcatccagtggactgtggagatataatagcaattagtccttatcttcctagagcttgcattgaagctggagagacagataaacaattatgtttatgaactttgataaatcttagaataggagaagtagaaagctataggcatagattgcatgagtattttctccttatatttcccaattcagatttattgggttatcagaataatttcttattttacatacttttttattattgaaaaatgaagataaatatactaatacagtttcagttgtatgaaattaaagtatgattggaagtatacataatacacagttttatttctcaaaagtaatgtgacttcttgtaaaatatggaattaaacgtattagtaagtataatacataggaacttctctctaaatgtattacattttatataagatcagtatttggtctcatgcttagcaagtgtcatctgatgtaaatttatctgtgtcatccaagtttgcattaatcacaagtattttatatttactcagtatcaaaatagaatcttgactttttaattactggtaatgagatgattgtgttttgatggaaattgatctttatacctaatcaatgggacaagctatgtgaaaagagtctgaaattactaaactccacttggatttactgcacagttccccctgccttcttctattccatctcccctttaggcatgataccttaacaaatccataatagtcctgtgctatacaacaccatcatgacttacaccattttgcacaactttgaaagttttgtgatttttaaaaaattagccatgtgggccgggcatggtggctcatgcctgtaatcccagcattttgggaggctgaggtgggcggatcacctgaggtcaggagttcgagaccagcctgaccaacatggagaaaccctatctctactaaaaatgtaaaattaggcatggtggcacatgcctgtaatcccagctactcaggaggctggggcaggagaattgcttgaacctgggaggcggatgttgtggtgacccaagattgcgccattgcactacagcctgggtaacaagagcgaacctctgtctcaaaaaaagaaaaaaaaaattagctgtgtgtggtggtgtgagcctgtagtcccagctactcaggaggctgaggtgggaggattgcttgagcccagaagttctaggatgtggtgagttatgatcatgccatagcaacccaccctgggtgacagagtgagaccttgtctcaaaaaaaatatgtatatagggtggctggcaagatggccaaataggaacagcttcggtctgtagctcccagtgagatcagcgcagaaggcgggtgatttctgcatttccaactgagtgtaaacaaagctgctgggaagttagaactgggcggagctcactgcagctcagctaagccactgtagccagactgtctctctagattcctcctctctgggcagggcatctctgaaagaaaggcagcagccccagtcaggggcttatagataaaactcccatctccctgggacagagcacctggaggaaggggtggctgttggcacagcctcagcagacttaaatgttcctgccttttgactctgaagagaacagtggatctctcagcacagctttcaagctctggtaagggacagactacctcctcaagtgggtccctgacccctatgactcctcactgggagatacctcccagcggtggtcaacagacatcacatacaggagagctccggctggcatctggcaggggctcctctggaatgaagcttccagaggaagggacagacaggaatctttgctgttctgcagcctccagtggtgatacccaggcaaacagggactggagtggaccaccagcaaacaccagcagacctgcagcggaggggcctgactggtagaaggaaaactaacaaacagaaaggaatagcatcaacatcaacaaaaaggacatccacatgaaaaccccatccaaaggtcaccagcatcaaagaccaaagatagataaatacacgaagtgaggaaaaacgagcataaaaggctgaaaattccaaacaccagaatgcctctcctcctccaaaggatcacaacaccttgccagcaagggaacaaaactggatggaggatgagtttgacaagttgacagaagtaggcttcagaagataataaaggtaataaactcctgtgagctaaaggagcatgttctaacccaatgcaaggaagctaagaacctggaaaaaaggttagatgaattgctaactggaataaacagtttagagaagaacatgaatgacctgatggagctgaaaaacacagtacgagaacttcatgaagcatacgcaagccatcaatagctgaatcaatcaagcggaagaaaggatatcagagattgaagatcaacttaatgacataaagcatgaagacagaattagagaaaaaagaatgaaaaggaagaaacaaagcctccaagaaatatgggactatgtgaaaataccaaacctgtgtttgattggtgtacctaaaagtgacagggagaatggaaccaagttggaaaacactcttaaggatattatccacgagaactttcccaacatagcaagacaggctaacattaaaattcaggaaatacagagaacacaacaaagatactgctcgagaagagcaaccccaagacacataatcgtcagattcaccaaggttgaaatgaaggaaaaaatgttaagggcagccggagagaaacattgggttatacacaaaggaaagtccatcagactaacagtggatctctctgcagaaactctaaagccagaagagagtgggggaccaatattcaacgttcttaaagaaaagaattttcaactcagaatttcatatccagccaaactaagcttcataagcgaaggagaaatgaaatcctttccagagaagcaaatgctgagagactttgtcaccatcaggcttgccttacaagagctcctgaaggaagcactaaatatggcaagggaaaacggtaacagccactgcaaaaacatatgaaattgtaaacactgttgacactaagaagaaacagcatgaacaaacaggcaaaataaccagctagcatcataatgacaggatcaaatccacacataacaatattaaccttaaatataaatgggctaaatgcccctgttaagagacacagactggcaaattggataacgagtcaagacccatgagtgtgctgtattcaggagacccatctcatctgcaaagatacacataggctcaaaataaaaggatagaggaatatttaccaagcaaatggaaagcaaaaaaaagcaggggtagcaatcctagtctttgataaaacagactttaaaccagcaaagatattaaagaaaaacaaaaagacaaagaagggcattacataatggtaaaggaatcaatgcaacaatagggatcaatgtaacaagaagagctaactattgtaagtatatatgcacccagtacaagagcacccagattcataaagcaagttcttaaagacctacaaagaaactgagactcccacacaataatagtgggagactttaacaccccactgtcaatattagactgatcaacgagacagaaaattaacaaggatgttcaggacttgaactcagctctggaccaagcagacctaatagacatctgcagaactctccaccccaaataaacagaatatacattcttctcagcaacacatcacacttattctaaaattgaccacataattggaagtaaaacactcctcagcaaatgcaaaagaatggaaatcataacaaacagtctctcagaccaaagtgcaatcaaattagaattcaggattaagaaactcactcaaactacacaactacttagaaactgaacaacctgctccggaatgactactgggtaaataacaaactgaaggcagaaataaataagtttgaacaaagacacaccataccagaatctctgagacacagctaaagcagtgtttagagggaaatttatagcactaaatgcccacaggagaaagtgggaaagatctaaaattgacaccctaacatcataattaaaagaaccagagaagcaaaagcaaacaaattcaaaagctagcagaagacaagaagtaactaagatgagagcagaactgaaggagatagagacacaaaaaacccttcaaaaaatcaatgaatccaggagctggttttttgaaaagattaacaaaatagaccactagccagattaatgaagaagaaaagagaaaagaatcaaataaacacaataagaaacgtgttgatcccacagaaatacaaactactatcatagtttgtacacaaataaactagaaaatctagaagaaatggataaattcctggacacatacaccatcccaagactaaaccaggaagaagtcaaatccctaaatagaccaatagcaagttctgaaattgaggcagtaattaatggcctgccaaccaaaaaaaagtccaggaccagactgattcacagccaaattctaccagaggtacaacgaggagctggtgccattccttctgaaactattccaatcaatagaaaaaaaggaaatcctccctaactcattttatgaggccaacatcatcctgataccaaaacctagcagagacacaacaaaaaaagaaaatttcaggccagtatccctgatgaacatcaatgggaaaatcctcaataaaatactggcaaactgaatccagcagcacaccaaaaagcctatccaccacgatcaagtcgcctttgtccctgggatgcaaggctggttcaacatatgcaaatcaataaatgtaatccatcacatgaacagaaccaatgacaaaaatcacatgattatctcagatgcagaaaaggtcttcgataaaattcgacaccctatcatgctaaaaactctcaataaactaggtattgatggaatatatctcaaaataataagagctatttatgacaaacccatagccagtatcatcccaaatgggcaaacgctggaagcattccctttgaaaaccagcacaagataaggatatcctctctcactactcctattcaacatagtattggaagttctggccagggcaatcaggcaagagaaataaataaagggtattcaaataggaagagaggaagtcaaattgttgctgtttgcagatgacatgattgtatatttagaaaaccccattgtctcaggccaaaatctcctaaagctgttaagcaacttcagcaaagtctcaagatacaaaatcaatgtgcaaaaatcacaagcattcctatacaccagtaatagacaaacagccaaatcgtgagtgaactcccattcacaattgctacaaagaaaataaagtacctaggaatccaacttacaaggtatgtgaaggacctcttcaaggagaactacaaaccactgctcaaggaaaaagagaggatacaaacaaatggaagaacatttcatgcttatggataggaagaatcagtatcgtgaaaatggctatcatgcctatagtaatttatagattcaatgctatccccatcaatctaccattgattttcttcacagaattagaaaaaactactttaaatttcatatggaaccaaaaaagagcctgtatagccaagaaaatcctaagccaaaagaacaaagctggaggcatcacgctacctgacttcaaactataccacaaggctacagtaagcaaaacagcatggtactggtaccaaaacagatacatagaccagtggaacagaacagaggcctcagaaataatgccacacatcaacaaccatctgatctttgacaaacctgacaaaaacaagcaatggggaaaggattccctatttaataaatgatgttgggaaaactggctagccatatgcagaaaactgaaactggattccttccttacaccttatacaaaaatcaattcaagatggattaaagacttaaacgtaagacctaaaaccataaaaaccctagaagaaaacctatgcaataccattcaggacataggcataggcaaagactttatgactaaaacagcaaaagcaatggcaacaaaagccaaaattgacaaatgggatctaattaaagagcttctgcacagcaaaagaaactatcatcagagtcaacaggcaacctgcagaatgggagaaaacttttgcaattagcccatctgacaaagggctaatatccagaatctataaggaactaaacaaatttacaagaaacaaacaaccccatcaaaaagtaggtgaaggatacaaacagacacttctcaaaagaagacatttacacggccaacaaacatgaaaaaaaagctctttatcactggtcaccagagaaatgcaaatcaaaaccatgatgagataagcatctcaagccagttagaatggcagtcattaaaaagtcaggaaacaaaagatgctggataggatgtggagaaataggaacacttttacactgttggtgggagtgtaaattagttcaaccattatggaagacagtgtgccaattcctccaggatctagatccagaaataccagttgacccagcaatcccattactgggtatgtacccaaaggattataaatcattctagtataaagacacatggatacatatgtttattgcagcactattcacaatagcaaagacttggaaccaacccaaatgtccatcaatgatagactggataaagaaaatgtggcacatatacactatggaatactgtgcagccataaaaaaggatgagttcgtgtcctttgcagggacatggatgaagctggaaaccatcattctcagcaaaataacacaagaacagaaaaccagcactgcatgttctcactcataagtgggagttgtacagtgaaaacacatggtcacagggagggaaacatcacacaccaggacctattggggggtggggggctagggggagggatagcattaggaaaaatacctaatgtagatgacaggttgatggatgcagcaaaccaccatggcacttttatacctatgtaacaagcctgcacattctgcacatgtatcccagaactaaaaagcataataataattttttttaaatgtatataatttcaggtaagtggaacattgtctttgagttacacagggtttaacagattattagcttccaggaatgagtacttagaatagaccttttaaataaggcattttaaaatagacaataatgataatagcatccttttaattataagcttcattgtagattatgtcacattaaaatacataccttgccagtcacattcatggtaactatttagtatatgttagaacagacaaagagaaccttagtagtaaactatatggtgtcataaaattcacatagcaatttattaatatttttactgtattttgctttctggggattattttatttgtataatagtaaaatctataaataaatgccttggtatttaaatttgtatagcttgcttaatacaagaaataagaaattcagtcaaaataacaatggagttagacacattatggtaaaaatgagcttataagggaaggctgccatgtctatcattagccagaagtaatttaggttgccaagtaatactggcattgattttttaaatagctattttatcattaaaaaaattttctgctccttttctgaaatgttgttctcagtacccaagcctctatgtcttaaaataaaaatttgatcttaaccaaatctcaagaataaattagttgctttgtatattagtaacctaggtatgacagaaatgacttttttcttaaaaattaactttgtgggctgggcgagttggctcacacctgtaatcccagcactttgggaggccaaggtaggtggatcacgaggtcaagagattgttatcatcctggccaaaatggtgaatccctgtctctactaaaaatacaaaaattagctgggtatggtggtacgcacctgtattgccagctactcgggatgctgaggcaggagaattgcttgaacccaggaggcggaggttgcagtgagccgagattgtgccattgcactccagcctgggcgacaagagcaagacttcatctcaaaaaaatgtgaaactgatataaaaatagccatgtattaaaaaatgtgttgctacttgaaggtgtctttttaaagaaaagtacaaatatttaaacgtggattatcttaaccctaataataggacaatttaagataggtagtaaagagataaaggagtaaaagagtcacatgataaaacgaaaaacagtgtgcagctgtatatcctggtctccagttgtaaaatggggattctcttcactttatggttattagaattttcctaaatattttagaaaccatttattttttgattttatataattgcatcagttaagaatggtattgggacactctctaaacagtggcttaaacaaattaggggttgcgttgctgacatacatgataaccctaaaagtgtactatctaggtatgatactgggcttccagataccctcagagaccatggttcccttatctttctacttagagttagtgtgtacttgttgcattgttgttataatatgacatctccatctgtagtgacttccatttacatcttactgaccaggcctgtgtcaaatgcatgtaaatgaatagttctgaaaattgctacttcaaccataacactgatcttttaagtataaaaattattctaaatctcctatcttcaagtgaggctgtgaaatgaaatttttttcatttgtgcacattactgccctaaaacaaactggacttcaaaaaatgaggaagaattagagaatagatacttggtaggtaaaaagtgatatttgccatgatatctaaatagtaaccaaatggataagctcaatctttaactattgtctgactcctgtgaagacaaagaataatgaaagagaataactttttaatcaggaggttctttggaaacaagacattataatgtttcaaggaagtcttgctctgtcgcccaggctggagtgcaatggcgtgatctccactcactacaacctctgcctcctgggctcaagcgattctcctgcctcagcctcccgcgtagctgggattacaggcatgcaccaccatgcccagctaattttttgtatttttagcagagatggggtttcaccatgttggccaggctggtcttgaactcctgaccttgtgatcctctcgcctaagcctcccaaaatgctggtattacaagcgtgatccaccgcgctagcctcaaggaagtctttaaaaaaaaaattgtgggaagaacatgagatctaccctcttaaatttttaagtgtacaatgaattgttttctacatgtacagtgttacactatagatttctagagcttattcaaattgcttgactgaaatttaatgccattgattagtaactccccatttccccctcaccccagcccctggtaactaccattctactctttgattctgtaaatttggctattttaaatacctcatataagtggagtatttatcttatcatgcagtatttatctctttgtgactggcttatttcatttagcctaacgtccttaagattcatccgtgttgcgtgttgcagaattttcttctttttgaaaactgaatagtgtttcattctatgtatttattgtatttcatttatccatgcatctgtcagtggacatttagggttattttcacatcttggctattgtgaatagtgctgtaatgaatataggagtgctaacatctctttgagatcctgattttaattattttggaaaaatgcccagaagtggaattgccagatcacatggtagttctatttttaatttttggaggacttgccatgttgttttccataagtacaataccattttgcattcctacaacaatgtgcaagggctccagttttcccacatcctcaccacttgttgtctttgcttttttgattatagccaacctgacaggttttgtggttttgatttacatttctctgattagaaatgttgagcgtttctcctgtatcagttggtcatttgtatgaattctttggagaaatgtttattcaagaccttaattgcgttattagtttttactatagagttgtaggggtttctggtacattttgaagccaaatcccttatcagatacatggtttgcaagtattttttcccattccatattttatcttttcccattccatattttatctttttgccctcttgattattttctttgctgtgcagaaacattttagtttgatgtagtcccacttgtctgtttttgctgttgttacctgtgctttgggtgtcatatctgtgaaattattgctaagaccaatgtcatcaagcttttctcctgttttcttctgggagttttacagtttcaggtcatacatgtaagcctttaatctatattcagttgatttttgtgcatgatataggacaccagttttattctttcgcatgtggatatccagttttccaagaagcatttgttaaggagactatcctgtccccattgtgtattcttagcacccttcttgaagataagttgactgtatacatgtaggtttatttctgggctgtttgttctgttccattggtctatatgtctgtcttaatgtcagtaccttactgttttcactactgtagctttgtagtataatttgaaatcaggaagtgtaatgcccaccagctttgttctttttcaaggttgatttggctgctgcttcttgaagaagaaggttgtggtcttctgtggtttcatgtgaattttaatatgtttttctgtttttgtaaaaaatgccattaggattttcataggcatagtattgaaactgtagatcacagatatgtctttacagaaatacaaaatagatataaattgccccatttatggatgcttcttctatacaacaggagtagtaaaaattattctgcatattctttgaatttcacttattatctatcctggagaaacattgcatatgcataagatgtggttaagaatgcctgcttttgcattattggtaatagcaaaaatctggaagtgacttaaatgcccgtgagtaaagggaactggtctgacaaactgtagtattttcatacaataaaatattgtacagctcttaaaaggaattagtcaaatttatgtgtaacaacatggttacatcaagaaaacattttaaaaggaagaaaatcgagttgcagaacagcgtatacagtgtagaagtacaactcttaatgtagaataactatatcaagaatttttaataaaaatcaacatatgaaatagtcataagcttttaattaacacagtttgttaatatgtggttattgtttagggttctcggtgctcttctgatgccaatatgcttggagagatgatgtttggctcagtagcaatgagctacaaaggatccaccttaaaaattcatcagattcggtgagaggttttctgatttttttttaacgagtcccatttttagatattttcgtttttttagagagaattttatatgatcttcactcagattgagcttgtcatactccatttaacatgttctatggttttaatgctacttcatggctcttgcagctatgctgtgaaacctctgtgacttacacatttttatttataataaatccaaaaggtcattatattttagttttggtctctctctttctctttttcttcatagttcccctccacagctcatgctcagcaaagtgtttactgctcggactggcagcagtatttgtgggagtctcaatacgtaagtgcttatggatacagggggaaatgtatcactttagatgtgcaaagtatgaaaactaaccaactgcttttaggactgcagcacaagttcagattttctgtctttccttaagtttaaaagttcatggaagccagatttcactcttaattgagtttagttgagaaacatgagatgtggtttctgtttctgtgaattgctagaagcagtatctggaagtagaatgttgaatggatttccgtcttagggcaacatgctgatttttcagttttgcggtaccacgctgagttacctgagttaccacaatctgtagggttggtgctcttcaattttcagatcccctacgaaattaaccctaaagacaggactgacctaggtcagccatactgatattgcacatatacactatataatgatagccaccagggtattacaagctattaatgcaaagattagaatagtgaagctgaaacaaaggcaggcctggtgtcaggatcatgggccatgtgccagaacctagtaaattactggggctaaagttaggcagtggaagaccccagagagagattttgcaggtgccatatcagagcaagactcattggctagtcagagcccctgggggtaacccaaggtcaaaggcagcaaggaagctactccagactacagaaattctgtagagcccccattaattgttaatgccttaaaaagacctgtttggaagagttttattagctaagtttctaatacctgtaactctttggaaggaaagtgggaggtagtctttttttttttttttcgagatggagcctcactgtgtcaccacggtggagtgcagtggcgtgatctcagctcactgcaacctctgtcctgggttcaagcgattctcctgactcagcctccagagtaggtgggactacaggcgcaggccaccacgcccggctgactttttttttttttgtatttttagtagagacagggtttcactatgttggccaggctggtgtcaaactcctgacctcaagtgatctgcctgcctcggcctcccaaagtgctgggattacaggcatgagccaccatgcccggccatggggggtatcctttaaaatattatggatgccttaaaaaatattgaagccaaaaatactgatttttaaaagtagaaattagagatctactaaagtagaaattaaagattccatgttggaatcactgatgttagccataatcaccagagttttttcaccttttctaagttctgataattcctaaaatctctagaaaggatattttgcactaaaagcataaagtacttttatttttcttatcctgaaagagacactaaaagaagtgatataggttatttgtaatatattacagtaaagatagtttttggatatttgcctaatgatttattctcctcttcttcctcctagcttccacctctccctaacagataattagaaaatatttttaggtctaaaatatgaggggaaaccttgtttgtaatctaaatcaggttcagcaacttctactttaaagatccagatagtaaatattttttggcgcaaagacttggaaccaacccaaatgtccaacagtgatagactggattaagaaaatgtggcgcatatacaccatggactactatgcagccataaaaaaggatgagttcatgtcctttgtagggacacggatgaagctggaaaccgtcattctcagcaaactatcacaaggacaaaaaaccaaacaccacatgttctcactcatagatgggagttgaacaatgagaacacatggacacaggaagggggacatcacacactggggcctgtcgtggggtggggtgaggggggagggatagcattaggagatatacctaatgtaaatgacaagttaatgggtgcagcacaccaacatgggacatgtatacatatgtaacaaacctgcacattgtgcacatgtaccctaaaacttaaaatataataataaaaaaatatatatatatatttttttggctttgtgagccagacaatgggttgtagtttctcagctctgctgttgcagcatcaaagcattcatacacagtatataaatgaatgggcatggctgtgttccaataaaactttatttacaaaaagaggcagcagactagatctggcactccaggctatagtttaccaacctctgatttaaatgattatgttagttaatttgtaatgctaataggaagaaactgtttttgcacttaaaatttcatcaggatgtacaaagaattgtccttaaaccataaaatgaatttggaattaattttcttctcaccctccataggctacaagatagtcttgaattcatcaatcaggacaacaatacattaaaggctgataataacacagttattaatggactgcttggaaatataggtaaatggttcctttgattttataagtttaaaaaatactagcagggtaacaagtgttttttgaagttattccttaataatgcagatctgtcatgataacaaagaatttcaaatactgtaagtggaagaggcatttaaattgccagtatgtataacatttatttggaaaacatatttttcatatatttgaacacaatatttattttgtatctgataaagagtactgctgtagatatatctaatttgtcttcattgtttttcgttgttaaatttgatgcatctttgaaaggtgtcagtgataagaaaagcccttagtagttcttttggctatttcagctgaggaagactattacaccttcttccttctgtcttccataaccataaaagttattttaaaatgatgcttgtttttgtgacctgtaactcagatgagcagatgttcaaatttgatgtttcttaaaagatttattagaataacaatttatttagtactttggttagctgattgttgttatttaagtaccacattttaaagtgacagactttctaaaatttctggtcattttttctagacagctcaactgaactgctgctgtattgcgatacttctggtgcataaaaagctatgtagtagccaagggaatgggatagcaattagaatagtattaatatttcttccattttctgtttagtaagaacttttatttataattaattttaataaatatttgttatatattagtagaaaagttttttcttccaacttgaactgtatgacatcctattatttattttttataatttgtgtttattcaaatgagcaatcacttataaaacacctattactgtgggctagtcatagtgttaggcatatactttataatgtgtgtgtgttatagaaaaatagaagttctgcattttcttaactcgcttgattacttcattgattttaataaaggaaaaatgtgacaaagaaataatgaaatctcttttctttataatttgatacttttcaaagctcaaggggcttgttgaaagttgaaagtaattatgggttttttttgtttgtttttgttttttgatatggaatctcactctgtcacccaggctggagtgcagtggcgtgatcttagctcactgcaacctctgcctcccgggttcaagcgatcctcctgcctcacccttccaagtagctgggactgcaggcacgcgccatcacacccggctgatttttgtatttttagtagagacagggttttgatgtgttggccaggctgttctcgaactcctgaccgcaggtgatccacccacctcagcctcccaaggtcctgggattacaggtgtgagccaccgtgccccagccaaaaggaattcattttaacaacacaaatccattattacttataaaggtaaattatactatagaggttagatatacttgtcttcacttttaatatagagtagaaaatccattttacatactactgactttaaataatgagcaacatttacttgcactcttttaattgtgaatcaaggattttttgtgtgtgtgtctaccatttcttattttctttcaatttccaatcaatcagtcaatcaatcaataagtatgtggtgagcacctgtaatataccaagcactctgcttggccctgaagatgcagtggtgaaccagacacagttcctgcctcaatggatttatagtgagtggaagtcagaaaagtaatacaacaattacagtatactatagtaaattcttagagttaaaagcagtgtgtgattaaaataaggagaagcactcaattcagtcctggagagtcaatgaaggcttccttgaggacatgaggcttaagcttgaaggattagtcagatggttaggggaagaaatgttctatgaagaagcagtggtacgtacacagacctaggggtaagagatcatagagtatggaaagaatgtgaataaatcagtatgtgtggagcacagagtaggggtaaagttaatgaaaaagaaagaatggagcaaaagctagatcacaaaacacactgtaggccacactgaggaatttagagttaatgcttggtgtagtgtagttgggcaccagtgcaggtgtgttggttcgggtcctttacctgttttttttaacggtttgccaaagacaggattaaacatgcaacaattgtattaggggaaatgactatgtaaaggaaaatgaggaaaatgctgggaaaggctgagagacccatcgaattgtgatgtaagtctgaccatgaatgaaggagagaggggtagaatgttgactggaagtgtctcagcccgctatacagttcaagggagggttagcaaggccctgggaagtatttgagtcaaagttggttgtcagaagtgtcccatgtctccccaaaatgggcctgcctttgtatacctactgtgttcagccattggctgggagcagcctatcagctatgtgtccttgcacaaatgtggcaatagatttcagcaggtgttcttaatcaacatactctttatagttggagatctttgacatatattctcgaggtcaccacagaggaatttttggaatatagcaacacagattacatttgtatctgtagaagaatattctaactgcagtaggaatggattcagataagtgggattgagaaaaggcccctattagaaggctgatcatgttactccaaatgacagataatgttacctacagtaaattagtgtcagtggggatagttgttgagaaattcgctaagggacatagagtggaccagattagctaattaaatagaagaggtgaggcaaaaggaagaatcaagtttggcactttgctggctgtttaattgcatgtatattggtgctattcactaagggaaatagaagaaatcagaattgatgattttaggtttaggcatgttcagttggaagtactggaatatccaagtgaagaaatccattgttagctagttagataggtatattgtagggtattctctttaacataaaaatggatgagtgtttaataatttaaaaataatagaagttgaccagttagttgtatcttctgtggatttgagaatcatcaggacataaattataattgaaagcacgggaatggaggatgacctaggaaatgtaaagaatgagaaggaaagattgttgaagatggaaccctggggaatgctggctttaagaaggggtacgaggccgggcgcggtggctcacgcctgtaatcccagcactttgggaggccaaggcgggcagatcacgaggccgggagattgacaccatcctggctaacatggtgaaaccccattcttttgtaaaacacaaaagaaaattagccgggcgtggtggcgggcgcctgtagtcccagctacaggctgaggcaggagaatagcgtgaacccgggaggcggagcttgcagtgagccaagatcgtgccactgcactccagcctgagcgagactccgtctcaaaaaaaaaaggggtaggagaagagaggcacacagactaagactgagggggaaaaatacagagagtgtgttacatgggaaaaaagtttacagtgtaatataatcagcatcaattactgctataaggtaatataaaataatatggactaaattaagcaacaggaaggcttttggtggcctagatgagcagtttcagtggggagaatagacatcagaatgggacgactcagggtttggacttttgtccaagatgcaagcagtcgttctcaaactttttggttttaggaaccctttacacacttagaaattattgaggactgcagagaacttttgtttatgtggattacaactactgataaatactttattagaaattacaaccaaaaaattgaagaatatttagtaaatccttgaaaaattacactaataccccctttcatgttattacaggcctccaaaaaattagtaagaagagtggcattgttttatatttttacaaatctccttaatttgtggatgaggatacagctaaattctcatatctgcgtctgtattcagtcttttgtgatattttcgttgaagtgtatcaagaaaatcctgtctcacacagatatgtagttggaaaatggaggacttcgcagaccccttgaaagtctcggggacccaacgggtccttggatgacattttgagaactgctgaactgctgtaggattagatatatggagggtggtagaagagaattgattgtgtttaagtgttgacagaataaggaagttataaggagcatgaaattaaagactagaagtagtaattgatagaaggaggtttttgaagaagaatgggggattggggtcctagctgacttagagttaactttggaagggaggaaggaacttaggattttttaataagtcactagcacattgtaaggcttgaataacatgacagcttaggcaggaaggaggcaaggatggatgagagagtaagttttgaagcagggtgataggaaaaaaaagggttccaatctggttaattctactgtgtgtatgtgcatatatgcatgtgcatactctaggaaacaaaagttttatgctgagaagaagaggtagggaaggagtttgaagaagtagataatttttaaagtaacgagggaaagaaagctaggacgaattaaaaagctgaccattgagacatggaaggattgctgtacatgtgctgtaattatagaagttcttgctacagaaaaataatatctgttagcaatttgaaaactacagttggctggatacagtggctcatgcctgtaatttcaacactttaggaggccaaagcaggaggatcacttgaccccaggaatttgagatcaacttggcaatgtatcaagactttgtctctactaaaaagttctcaaaattagctgggcctggtggcatgcacctgtagtcctggctcatggggagggttgaggagggaagatcactggagctcaggagttcgagcttgcagtgagctatgattatgccattgcattccagcctacatgacagagcaaaactctgtttcaaaaaaggaaagaagaaacatgcaattgtcactttttaaaacagaaagccccgtattccatcctagttaaatgtccttcatggctatttagactattttcatgaagcataactaacaggtaacccagctgcttgctttcaggctataatgtccttcttgggtcttcagactgcagttaccttttcttgatgaagcatgtggcagccacttctcttgaacagctgggagtctggtccctgatgagcttcatttgtgttcctccttccacagtggctgactcctggtttagtaaccttggtttcttccattactttgtaacttacaactgggttagaaaaaccaatttttaatttgtcagtaagatctcttctggttttgcaccctgttgtatgctgtgtgccaagtgcttaggtggttttctcctcgctgcagttgtaggcacatactataatcttcaaacaactttaaaaaaatgaatttatttggcaaatatcaggttagatagataacattatcgtactttttcaaatctttaaaaatactgctttacattagaaaggattgaacatttaaaataatttttactttatatagcagaagcttgtttttattacatatagatttattagtaaaaatacatgaagttgttgtttcatataaatcatggctaaagaaacaccatcctgtttcaaaaatgggaaagacagcttgaattcttatttagtttaaaagtttccatccatatttgttggtctgctcttgtgctgccttagctcaccttttttccctgacgcattgtggcttctctaacagtcctctttcatgtgtattttacgtttttgccatgtaggtctttcacagttctgcagccccaggcgggcattctctgagcagggtccgctccgcctgatcaggagcgcctctttctttgcaggtttgcgatgtgctgtgtgggtagactagttggtgtgccccaacggctagaatctgtagttaagctgtggaaacaagagagtagatgaatgcagttggtgaggttgtggttaagaaaacattgcattaggaagtataaaaacttaattccttttctactgaacatgttcttaaagtttccagacaccggattatcagtagaattgacatttttatgaaatttcagtttgtcatttctcttgtggcataatgattttaacttcagaatctgaaaccaaaacttaatatgaactttatttcttatgataccacttggaatttttaatgtgacactgtcttgtttccatggctgagtagcttttgtaccatagttcaccaattgcagaaaattatcctatcttgttattattgtaaaatttctgatctacactattccgtaagagcagtttttcttggagctaagatttagatgaacaagcactactataatgctctgtaaaaggcatatatgactatatttgcttacataatcaagttgatgattgtagagtatgttcatgtgtatatatccaggattctaatcatattccttgttttcacacattttagcggattacctaacattgtaaccttttagtggaaattactggaatgtgaacacatttactcttcattgttctcagattggtatcaatttagcccttcttgttttgattaatattttctttccctgtaaatattagatataaaaaatatatatttgtagaaaacttggaaaacacttttaaaaggcaaaaatatatattagccattttatcagccagaaatacctgcttttttgttttttaaagaaaatggggatcatactattcaaataaatatctcaatttattatagagaattttgaaacatacattgttataggcagaaacagtacagtgaactatgatatacccaccacttggtcccagcaagcactcatactgttcagtagcttgctttttttcatttaatagtatattataaatatgtcactgaatatgcttccaaaatatgacttttagtcactccttgcttctttagatattatgttttagattcttatactgtgtatcaaatcttcacagagctctcaaagcttgttcaactgagtaatagctcttggtgttgggttggtgccatgctattgaaaaaaataagggaatgcaatgagatgagcatgatttcgtttgctatttaaaaggagctgttcatccacctgaatagcaatatattttataactgacagtttcatctttatttatagttcacagcaacccaatggacatgcctggaagagagctcaatgaggacagagacagtggcatagcacggtctggtaatgtcacgttcttgtattcagttttttatgagattactgttggcattgattttcttttttatccctccctttattatcaaatttgttcatattgatattagccttacaagagaactgtgaaaagaccagagcaaagtcttataaatttaatatttttcatgtttacttttaagtgtgctaagtaggataaagccaggatgaagtaaagccagagtaaagtacactggttgaagcttagtgaatataagaagaaaagcattggtcagaaaaactgcttagaaactgtagtaaaaaaaaaacacgtttgcttatatttgcttgctgctaactaaagtttaaattgtcatattgtctcttgcccagaaaagcataggcattttgaatcaatgttatactttttttttttttccaaatatggacctgtccaaaatttgtaggtctagcaaacatttattgaaacatggtggacattaaaaaaattaaagcccagagtctgcccttacggaacacagatgtatggagtctactgggagaaaaattaggaaaatcatctgtcataggtcattgtgtgatgcatttagtgataggcctgcgcaaaaagcttcagcgaaagagcaccacacttagcctgggcaaggggcagggatgccaacaatgctttacagaaggatgatgattgagttgtattttgagaaataaatagcagttatccaggcaaaagctcagaaaagcattttagctaaaaggaaaagtgtttgttggggcccagagagcagcataagtaaaaggaggagtaattttaggcttgaattactgttagatatgagaaacttaattcagtgtgatagcatgtgttgttacattatatggctctgctatcgaaattgttttgtaattcagttttgagtataaatgaaaaatctaaacttgctgtatattgcaatccctaggtatgtattagaataacaaagagaagttttataaaaaattcaagtgcctgaactctactttcaaagactctcgtgtaacctagagaaggtatctctaggcatctgtatttgtgaaacaaaacaaaatgcaaaacctaacacttgattctaatggatagctagggttgccgaccactactctaataagagtagcttgtgtttttcaagtaatctcatctttcttttctaattgagtttcttatttttgttttaaagaatctagagtttatttcttttaataccctttgcttcgatgtaatctagatatttagtcttccctggcaggaatttaattctcattattttatttaagatttaagtataatttatttatacttacattctttgtaagttgaagcatctggctagactgatctgttaggctgcttcaagttattggattcatatatgccatttaagttaatgtgtgttttcttttttttctaatagggttatttttaatattagaatgcagtgaaatgtattttttccaaacttaggacagcattttatttttcactgaagtcatacccagatttagttgtacatacccaatcttggactacaagagtttataatactaattgataaaatgtggtctgcatttagaatctgcattctaaagtaatttagaatgagttcattgatggtctacatgtttgcatggcacatacagctttatcctctatcattgaatttgtcagaattcaaatgaatagatcttcataatgaaagtgtctcagtttttagtgctggtgtccaaaataatttatcatctggcctgtacctttttaatagtgatgataatggttccctgttttgaatatacattttcagtatgtgcttatgatcatgaaagatagaagtctggaatattgccaaacaaaagcaagcccttaatggcaagtgttatcctctctaaatccagtggggaaaagcctgatgaaaatctcctagcctaatgaaaaatcagcagttgtagctcttaacacctcaagcaataaacatatcttacagatttcacagaagtgtttcgggaagggaataatccatccccaagatcaggggattgcagccgtgaaagagtggagtctgctggaatgtgtttgtcaccttagatgctccagggagcattctttttttggagcttagtaggtatagtcatgattcttaattaaaagtggtaggtttgactacatgtgcacatgtgatccatgaatacttgtaaatgacctctttaaatgccattcagacacttattttcaatagcttgttcttaaaatccagctgctgcattaagtttgaatagcatcagatttcctttaatttaagaactaaaaggattcaactgagttaggggacagtcaatccagtggccaaagggataatgccttgttgcaaagtataattttcttctggagtccctagaggggaatgccaaaaggggattgtctcagagttttttgctgatacattgttaatatatgatttttctcctctgagaccttgctacaagaaggatgtgttcttttaatgaacatttttgaggctcatgaagcaaaataaagtttaacttaacctatttgtaattttgttaaaaagaaatttgtcattatgcttagtcattattgacttatacttgttgttcttctgacttaacagcatctctcagcagcttgctgatcactccatttccttccccaaactcctcacttacccgaagttgtgccagcagctaccagcgacgttggcgacgcagccaaacaacaagtttggaaaatggggtatttcctagatggtaagttggaactttaaacacagaacaagattgagtagttccttaaacacaattttatatgggttttttagaacctggacttgtattctgtgtattttaagtttgaaactgaaaacttttaaaatttactacatttttaaaattgtggtaagttatacataacaagttacaattttaaccatttttaggtgtacagttcagtgacatttgtttaaataccttcatattgttgtgcaaccatcatcaccatccaactccagaactttttcctcttcccagctgaaactctgtatccattcaacgtaattcctcatttctcccttttcttcctcttgtaaccaccattctattttctgtctttatgaattttcattcataccttgtatgaatgaaatcatacactgcttgtccttttgtgtctgccttatttcatttagcataatgttttcaaggtttatcgatgttgtagcatgtgtcagaaattcattcctttttatgactgaataacattccattgtatatacataccacattttgtttatccatttgtctattgatggacacttgggttgcttccacttcttaactattgtgaataatgccgctctgaacatgagtgtgcaagtatctgttcgagtccccattttcaatacttttggttatatatccagaagtggaattgctggatcatatggtaattttgtttttaaatttgtgaggaactgtcacgctgcacactgttttccatggttactgtaccattttacattcccaccagcaatgcacaatggttccaatttctccatatcttcaccagcacttattttctgtttttttgataatagccatcttaatgagtctgaagtggttcctcattgtggattttatttgcatttatctaataattagtgaagttgaacatcttttctattcttttcttttctttcccttttgagtcgcccaggctggagtgcagtggcataatcccggctcactgcagcctcaacctccctgggctcaggtgatccttccacctcagcctctcaaataactggaactacaggcttgccaccacacctggctaattttttttttttctttttttttagagatggggtttcgccatgttgcccaggttagtagaacttctgggctcgagtgatccacttgcctcagcctcccaaagtgctaggattacaggcatgaggcaccacatctgacttgatcatcttttcttgtgcttattggctatttgtatatcttttttggagaaatgtctatttaagtcctttgcccatattataactgcatttttttgctttgttggtgatgtctggaaattctgtatatattttagatattgatcccttatcagatatatgatttgtaaattttttttacattctgtgggatgcctttttactccattgatagtgtcctttgatgcacaaaaggttaaatttgtatgtagtccagtttatttttttttcctttgttgactgtgccttttgtgttatatccaagaaaccattgccaaatcagtgtcatgatacatgatgcctttaccctttgttttcttctaagagttttatgtttaggtctttgatttatatactacatgttttgatatttcagtttttcatgtttttattttggcaaggtaattcattcttgaaagattagtttttaatctacattaagtacaactgtagatactaaaagttcttgttttctcctcttttttatttcctttattccttcatctttgactttactcctgaaatcaaaaacagacaccagaagggcctagaacagggaaaagattgtaccagactcatctataaatcttaaaatttagccactttttggttgattatgaattgggattatctacttctttagttacttctaattggacaaaaaaatgttcccaatctgactctgtagtaaaatttcttacaagaacatgaacctgaaagaatagccagtagatttcttaaagagatatacaattggtatgaaattataggtttgtttgataaaacagcaaaagacttagcttacctacatttaattagcaagaagattaaattgtgaatttatttttacttttgtaaattaataaaaaatcatttatttttaaggtctatagaagaaagctttaatctctcagatgaaagctgtggccctaacccaggaattgtgcggaaaaagaagattgcaattggggtaatcttttcattgtccaaagatgaagatgaaaataacaaatttaatgaattctttttttcacattttcctctctttgaaagccacatgaacaaattaaagagtgcaatagaacaggtaagcatagttatttatttatgtattttccttttaaaatcttattctcccaattaagcattatatttattaatttggcagaaaaattaacagacgttgtgcatgtgtcctataaagtgctctgttggatgcaaatagattgaaccctttttaaggtgcttactgtctagtaaaagatataagatcattcatccatttgttctgtaaataaatatttgagggactaaaatgtggtagacaccgttctaccaactaaagagaagtgataaaagcaacacttctgacctcatgggacaaataaacatatgaatatagatgtatgtaataagtcctgtgaagaaaaataaaacggagaacggtatataagggatcctgcaaggaaggattactaatttttataggctagtcaggaatgccccttattaaaggacatgtgaatgtggtccagaaatacggagcaggtgagctacaaccatctggaacgagatattccaggcaggggcaaaggccttattgcaggagtaagcctgatacttaagcagcattacgaggccaaggtgcctaggttgaagtgagactagatcatgtaggaccttataagataccattgtaagaacattagcatttattcttacaaaagtatgaaagatgggaaaccattggagggttttcagtggaggaagaaggacattatttatgaggatcactcttactgctggtggataatagatttctaggagcaaaagtagatgttgtgagaccaattagcatactgttacagtaatccagatgatgaatacgcaaaccactttagtgactgaattggtaagaaagagttggattctagatatattttgaaaacagccagtttgattagctggtagactaatcattaaggttgactctaagatttttttagccaagcagttaaaaggatgaagttgccagcattgaagtgagaaagactgcaagcgaaacagatttgataaaggaagatgggtattttatatttgcatatggacatccttgtgtttttatgagtctggagtttaccagagaagtcatcagtgtatagatggtatttaaagccatgaaactgatggagattggcaagagaggacaggcaatggtaagcctgagttgtggtgcattttaacattaagagtttgacgagatgagaaggaaccagcagaggcgaaggaaaaggattggctattcaattaggagaaaaaacaagagtgtattcttttggggaaagccaagtacagaaagtatttcaaggaaggagtgatcacttttgtcagttgctactgagatagtatatacgatacaaatatgtatagtaaattgtgaaatattagaatctaagctaaaaaggaaggacaaaggttttttagaaatttgggggaaagtgaaatgacttcctattgggaagaagtttcatttggactgcattttgaaggatgtatgggatgttttggaacataaagctctgaaaattggatatagcagaatagcaagaaaatcgacattcttgccacccaaagggaacacagtaactcattgctgaaaaatcttatttaggccttttttatgcatattgtgcttttacttggtagggattgtgctgtgtctacatttttcaaattatatgcccatttaaaaaaactcagattgagcaacatggcaagacccggtctctacaaaaaaaaatttaaaaattagccaggcatgggggagcacactagtagtctcagctactagggaggccgaggtgggaggggtgcttgagctcagaaggtcgaggctgtagtgagttgtgattgtgcctctgcactgtagcaacagagtgagtccctatctcaaatagtaaaataaaaaacatcattgtcacatacacatttctcaagttattgtaaatggttcttacatatattttagtaggtctcctcaatttaagtaacagtttccctgttaggccatttctacttttgcacaattgttgctaccctatcgttaacatcttggcgaattttccagattattttttagaggagattcccagaagttgagctgataaaatcagtggctgtcaccagagttttttgcaacagtctgtggaagggaaaggatacaaagaggaatagtgagaggtacaactggcgaagttaatgagtacctgatgacaaaaaatgtagcgtgcttgccagggagttctgactttgtctttaaggctgtttgcaagttgtactttggggagattaacttggcagtgtgttttgtatatggctgctgaaacgagcacttggtagtgcgttttgaagagactggagtaagagacgagaggtgggtagacccgttagaatggtttagaaaggaaaggatgtatctcaataactcattagtgactaaggatgatctgcctttagagaagacatagatgttagttattcatattgagtatgtcaaaaaataaatagttcattagcaatacatttttattgaacaaatgagtaaaggccattttcatttaccttttcttaagttagacactgattacatttcttcaattggctgcactcacattttgtagtctagccaaagtcatcacacacagtaataagttgtgggtgaactgacatttttagttatttggagaagtatttcaaactttgtataaaacttgaaataggcattatagaactcattaaagattacttttcaagtgttttcatgttttaacgctttgataattctgtaacctaaagcagcagtccccagcctttttggcaaccagggaccctttgtagaagataattttttcacggatggggctggggaggtggggagttgccatggtttcagaggcattagattctcataagagtgtgcaacgtagatcccttgcatgcacggttcacaatagggtatgcgctcctatgagaatctaatgctgccactgatgtgacaggaggtagcgctcaggcagtaatgctcgctcacttgcttgctcgacccaattcctgacaggccactgacgggtactggtccacggcccagaggctggggaccccgacctaaaatgtacattgttaatgcttatagttgtttggatatttgttcaattgtagtatcgcattttttattaaagctgaaagatgaaattaaatgaatgcttttacataagtgaatgggacttaatttttaaagttctatagtagttacttaatgatagaatattattaagaatagaatataatagtgaatattgtaccatccaaagaagttatcttctagggccagttttcagactatttttttttttaaataaaagctatggattttgtttctgaacaccttggcaattattttgaagtcttctatcttttgagatttgtgatttaatttaaaaatagcattgctgataagattaaggaagaacactaccaaattctagcaaaataatattcacttctttataaattgccagtctcttaacagtttgaaaaaacataaagcgtgtttcactttcaccctctgaagcttttgggtgtacaggaacatgatttctggcctaaagtaggctgacatcttaattatttttttaaacaatatttaatcactttgtaattatataaagaatacagaattcaattctctttgaaaaagtgttaaagattaaagttctttttgacctccatatcctaatcctgatcccctttttgcctacctagattaaggctttttaaccttggctaaatatattttaagaaagcaaatattggccaggcatggtggctcatgcctataaccccagcattttgggaggccgaggcaggcggatcacaaggtcaagagatcgagaccatcttggtcaacatggtgaaaccccatctctactaaaaatacaaaaattagcggggcatggtggtgtgtgcctgtagtcccagctactcgggaggctgaggcaggagaatcgcttgaacctgggaggcagaggttgcagtgagccaagattgtgccactgcactccagctggcaacagagcaggactctgtcttaaaaaaaaaaaaaagcaaatattactaacacctttagctatcttattgtagaatctttatattccctttttttttttttttttttttttgaaacagtcttactccatcacccaggctggagtgcagcagtggcatgatctcagctcactgcaacttcagacttctgggttcaagcgattctcatgcctcagcctctttcatagctgggattacaggcgtgtgtcaacacacctggctaattttcatgtttttagtatagacaggattttgccatgttggccaggctgggcaaatttttaaaaaagagttaacagggctgggggcagtggctcatgcctataaccccagcactttgggaggctgaggtgggtggatcacgaggtcaggagttcaaggctagcctggccaacatggtgaaaccccatctctactaaaaatataaaaattagccaggcgtggtggcaggcacctgtaatcccagctactcgggagactgaggcaggaaaatcgcttgaacccgggtggcagaggttgcagtgagccgagatcgcgccattgcactccagcctaggtgacagagtgagactcttgtcaaaaaaaaaaaaaaaaaggagttaacagaagtgttatctgtgaaatataagcataaaaccatgagttgttgttactgagttatcattatgtcttgttctgtttgggaaaaataagttttttgtaacccagaaactgtcaacatcagtttttttatgtgttgacagtctgcagttttaaaaataagagattgaaaacagtcaaaaattttgaactttgttcaaccattcattaattaccaaatgtgtagaagaaaaagccacaataaatgcatttactttctttatttctttctcgataagaattttgatagagcgttgtgtaaatatgtgactctgtctaaaaaagacttttttccatgttttgctcatgattaacataagaattaactatctcaatgattgttttcaaggctatgaaaatgagccggagatcagctgatgccagtcagagaagtttggcatataatcgaatagttgatgccctaaatgaattcaggtacatattgcccagctttccataatgcagtaattcatagtgtacacaggaagattcattttttctttaacttgttctaataaaatttgatttctttgtcctatagtcatatgatggtgtaattcagtagaccattggctcctatgttattacatctcaaatgtgcttgagaatcaagcacattgagagccatcagtggtatgtttttcagtattgggccatttgacaagcaaatatgaccaggaaagacccttgttctagcaaaagtatgctttgttctctcttgggatcctagatgtagggactgttaagtgttatttaaccagtggtagtaatcagatattcttgaatacatgagatacaaggatatatggatataaggaacatgcacttgatattctaaatggctttgttgcttgatccttcctctagatatggcacagtgaatagtccttccgctagggttttctggctcaacaaagcttgtacctgaagccccaacaactgctgtagctgtcttctaactatgtgacatacatactacaaatgatgttatgttgggaattagtatactaagtgactgatatgtctccctcgacaagaggttcggtttaggtctacttcattttctcaatctttcctcctttagactagagagatagaatagcatagggagtgaaaactaagactctagaatctgtcagacagaggtggattttaaccctggctctgtcatttactacctctggtgatcttgggcaagtgcattagcgtttttgacccctagttttctagtataaaataggtaaattcaatttagtaataatctaatagattgttataaggatcaaatgaaattgtgtgtgtaaggtacttagcagaatgcctgacattagtggcaccattcttttcttttctttttctttctttttttttttttttttttttgaggtggagtcttgctctgtcacccaggctggagtgcagtggcgtgatcttgcctcactgcaacctctgcctcctgggttcaagcaattctcctgcctcagcctcctcagtagctgggattacagacgcgtgccaccatgcttggctaattttttttttatttttagtagagacggggtttcaccatgttggccaggctgttctcaaactcctgacctcaaatgatccgcccaccttggcctcccaaagtgctgggattacaggtatgagccactgagcctggcctatggtaaacataacctacagcagtgcttccccaacttaagtcacttacatcatatcttaacaattttgccaaatttatatatcatgtatactttttaaatttagtgtttctctttaaatttgaccatcttttatacctaaataaatctatttcaacatgaaacttcattaccctagatagggaaacaatatgctttaccataataaaactagctataaaaataaatttatagtaactaaaattaaaaatatgtatctgggccaggcgtgttggcatgtgcctgtaatcccagtactttgggaggccaaggtggttagattgcttgagctcaggagttcgagactagcctgggcaacatagtgagaccccgtcacaaaaataataataaatgtgtatttgtataccacattgtgtacactacgtaccactgtgtaaattttattattaccagtagtctatgtaccttacttttagaaaaactacattttttttattgacaactgtgtggtctcttactggggcagggatcttctagattgttgtttgtttaaatgggccatcacatcttggagtgaaaggctgttttagtttgtgtaactgcaggattgctatgatgaaattgtaggcatgccatacatatatataaaattttaaaacttttaaaatatataaaacatttttaaaactgagctaaagagtggtagatttaaattgaagaagtttatgactattgtataataatcatttacttgactcaattattgagaaagagaataatgtctactcattcatttggtttatgcatcataatgtttaggataaaagatatgaaaagctagttaaatatatcttactgttctgtacagtacactcagtggttaggggaaatgtagagaaaaacagagagaatttaatttcaccttatattattttttggtattagaaataatttgtacaggcaaaaactgtatttgagatgatatttctgccatatattaattttattttaacattaattttaggcatttattatatggagcatgctaacaaataattttaatttaatatttttattgtaaaaatatctataacgttagatttagctttataaatcattttttaggtgtacagttcagtagtgttaagcatatttacattgttttgaaatcaatctctaaagctttttcattttgggacactgaaactctagtgatacggtaatcagtgtgggttttttttagtttactggcatcttcactctttatatctgaattatatgcaaagttattcataatttcatttcttcatacttaaaccataaaggttgagattatcacattttgggtgccattcatgattaaataaaagcattatatgcatgttttttatagatgaagtgtaggagaaatcaaatacatttgcagagggaatttagagcaacttttatgagcttcctgatgtacagtctactttggcttcataacttctcaatttatatagccctgtttgtatgtttctagaagttctgtgaaaacacaaaatttgatgattttatgaatgtaagatggaaataattttaacatcaggattatttgcttgagatgacaatttctttgagttgtattgttttaatataaatgtttaggtatcttctttatgatttaggaggtaaattatacaaagttgcttaaaccaagtgttaatggtttaggcctgcctaggatacatatcctaaccattgatttgatatttcagtaagtgttctacagttaaggaaaaagaagcccatattaagctcaagataagtggttttctgttttctcaatgttgaacacagtttttgaaagcaggtaaattgtaggtgatggaattccagccagccagcagacattttatgtgactactgtgtttttttaataaacatttgaacctttaggcctgtaggccaggcaagctttctttagtttggcataggctgtatctctctcagtcagttgtattaacccatatattgtataattttattcctgccaggcctcggaagattattagtttatacttcggttttaggagttggtgatttatagccattaatctagaccttattcttttttaatttgtagtgcagtctgattttcgtgcatcttctgatactatccatgtttgtgtctgaagagctagacctgcacaggctgaataatgactatcccttctttcttttcttctggaatattgagagtgggagtgggggacagcaaaacgaaacaataactaaatggtaaattctaagacatgcctatctcttatattgtctatttcttggccactctgtattatcagttaagagtataaatagctgtatatagctttatttttccagtttgatgcatgagtttatgcacgcacgtgcccacgcacacaatgaagagacttaatttgaacagtttcagatttacagaaaaattgagcaaatagcagttttttcatatagccctcttccccaacctacagttttcccagttaatgctttatttatttatttatttatttatttatttatttatttatttatttgagacagtgtctcactctgtggcccaggctggagtgcagtagcacgatctcaactcactgcagcctctgcctcccagggttcaagtgattatgtgcctcagcctcctgaatagctgggtttacaggcgtgcactactacacccagccaatttttatattttaaatagagatgaggtttcactatgttggccagactggtgtcaaactcctggtctcaagtgatctgtgtgccttggcctcccaaagtgctgggattacaggtgtgagccaccacacctggcgtcagttattaatgtattgcattagtatgatatatttgttaaaactaatgaactaatgttaatacattattactaaccaaagaccaaaatttacattaaagttcactctgttgtatagttatatggtttttattaaatgtatgatgtcatatacacaccattatagtatcatatagaataatttcaccgccctaaaaatcccctgtgctttacctgtttattcctacccactaactgctggcaaccactgatctctttacctctttactttctctatatttttatcaattccagaatgttgtatgcttgaaatcatatgctatgtggacttttcagactggcttctttcacttagccagtctttcgtaagattcttccttggtggtggtggtggtgttgctgttgtttttacctaatagctcatttcttttcatcatcgagtaatattccattatatagatgtaacacagtttgtttattcattttcattcacctatcgaaagatatcttgcttgtagtttttggtgattataaataatactgccataaatattcatgtttggggttttatgtggacatgttttcaactcagttggaaaaatacataggagcatgattgctggatattatggaaaaactatgtttagctttgtaagaaatgatcaaactgtcatccaaaatgactgtaccattttgcattcccaccagcaattagtgagagttcctattgctctacatccttgtcagcatttgatatggtcagtttgtcaattttagccattctaagaggcaggtagtgatgtatcattattgttttaatttgaagttccccagtgacatatgttgagcattttttcaaatgcttatttgccatctgtgtatctttttcggtgaagtgtctgtttgggttttttgtcctttttaagttggcttttttttcttattgttgagttttgacggtttttgttgttgttgttttgttttgttttggataccagttctttgtcagatttaaaaaaaatacttcttacagtttgtggcttcttcttataacagtgtctttcacagagcagagtttttaattttaatgcagtccaacttaacaatttttctttcctgtatagtatttggtgctgtatctaaaaactcatcacctaaccaaaggtcatttagattatctccagtgtaattttctgtctgctttatagttttgcattttatgcttatgactatgatccattatgaattaattttatgaaaactgtaaggtctttgtctagattcatgcttttacatgtggatgtccagtcgttgcagcaccatttgctgaaaatactttcttttctcaattgaattacctttgctccgttgtcaaagatcagtttatactctagttgtgtgaatctgtttgggggctccctgttctgttctattctgttctgttctgttgatctctgtaactatatatatatatatatatatatatatatatatatatatatatatatatatgtatatatatatatatgtatatatttagctattaccatgctttttttttttttagttgacaggtaaaaattgtgtatctttatagtgtataaaatgatgttttgatatgtgtacacatgtggaatggctaaatcaagctatttaacatatctattacctcacgtaattatcattttttgtcattaaaagacttaaaatctactcttagcaatattccagtatataatattattattaactgtagttgccatgatgtgtaatagctctctggagccctgaaatttttttttttaaatttattttttttttagacagtctcactctgtcctccaggctggagtgcagtggtgcgattttggttcactacaacttccacctcctgggttcaagtgattctcatgccccatcttcccaagttgctgggactacaggtgtgtgcctccacacttggctaatttttgtatttttagtagaggcagggttttgtcatgttggccaggctggtctcaaactcctggcctcaagcgatctgcccaccttggcctcccagagtactgggattacatgcatgagccctcatgccaaattttgtgtcctttgaccaacatctcccttatctcccaatccccatgctatcttaattactatatctttatagtaaatcttgaagttcagtagtatcagtcctccaactttgtttttattcttaagtattgtgttgattattctgggtcttttttgtttctatataaactttaacatcagtttgtagatgtccacaaaataacttgctgagattctcattgggattgtgttgaatctatggatcaacttgggaagaattgacgttttaacaatagagtcttcctattcattaccatggaaactattcccatttatttagatcatctttgattcctttcaacagaattttatacttttcctcatatagaccctgtgtatattttctcagatttatacatgttttttgggggggtcagggggagggaacctaatgtaaatggtattgtttttaattttacatttcagttgttcattgctggtctgtaggaaagcagttgacttttgtatatttacattgtattctgcaacctcattataatcatttattagttccaacagttgtttttttctttcgattgagtctttgaaactttttatatagaaaatcgtcttccacaaataaagactgttttatttcctttccacatgtatactttttctgtcttccttctttccttccttccctcttttttgtatctttgtgtctttcttacagccctagctataacttccagtatgatattgaatgagagttgtgagaggacacatcttgaccttgctcccagtcataggaaaaaaaacatccagtctctcaccataagtatgatgttagctgtaggtttcttgtagatattctttcaagttgaggtagttcccctttattctttgtttgccaggagtagataattattgattcaattttttaagtagacataggctattcaagttaatctatttctccttatgtgagttttggcagtgtgtgtttttcaaaaaattgatgcatttcatctaaatttgtgggcatagacttgttcatataattccttaattatccttttaacgttcatagtatctatagtgatacccctcttttgtttctgttatttataatttgtgtctttttgtgtttttcttggtttcctgataaaggcttaacaattttactgatcttttcagagaaccagcgtttggttttgttgatattctctattttctgttcaattacaataatttctgctctagattttactattccttatctcttgaatgctttagttttatgttgctgtttgtctagtttcctaagattaaagcttagatcgttgattttagatcttcttttctaatatatgtattcaatactattaatttccctttaagcactccttttgctgcattcacaagtattgataagttgaattcacatttagttcaaaatattttaaaatttctttcaagatgtcttctttgacctatgtgttatttagatgcatgttttcaatctccaagtatttggggattttccagttatctttttcttactgatttctagtttgtgatttgagaacatacattgtatgatttgtattattttaaatttgctaaggtgtgtcttatggcctagaatgtggtccattttggcaaatgttccctgtcagcatgggaagattgtgtattctcctgtttttggatgaggtattgtataaatgttaattagattcagttgactgatggtactgttcagctctattatatccttactaattttccgcctgatggatacgtcatttactgatagaggagtgttgaagtttctaaggaaaatagttgatttatttcttcttgcagctctgtttttgcctcacatactttgatgcttttttgttaactgcaaattcattaaggataattatgtcttcttggaaaattagctccttatcattatgaagtgcccctctttatctctgataattttcactgttctgacctctgctttgtctgaagttaacacggctattagtccattttcgtactgctataaagaactgcccaagactgggtaatttataatgggaagaggtttaattgattcacagttcagcatggctgtggaggcctcaggaaactcgtaattatggcggagtgtgaagaggaagcaaggcaccttcttcacaaggcagcaggaaggaaaagtgccgagcgaaggggaaagaagagctccttataaaaccatcagatctgatgagaactcagtcactatcacaagaacagcatgggggaaaccgcctccgtgattcaaatacctccacatggtcttgatcccttgacatgtggggattatggggattatgggcttacaattcaagatgagatttgggtagggacacaaagcctaaccttatcggttattccagctttcttttggttagtgttaatgtagtatatctttttctataccttaacttttattttattttatcttattttattttattttatttttgagatggagtattgctctgtcacccaggctggagtgcagtggcgtgatcttggctcactgcaagctccgcctcccgtgttcacaccattctcctgcctcagcctcctgagtagctgggactccaggcacccgccaccatgcccggctaatttttttttgtatttttagtagagatggggtttcaccgtgttagccaggatggcctcgatctcctgacctcgcgatccaccctcctcggcctcccaaagtgctaggattacaggcgtgagccactgcacccggcttctataccttaacttttaatctatctctgactttatatttaaaatgggtttcttgtagacaacataaagttggttctctgccttttaactggtgtattaagaccactcacatttgaagtgataattgatatagttggattaatatctatcatatttgtaacagttttctatttatttcactttatgtttttatcctcctctttttatgtcttctctggttttaagcagttaaacgcttccatttttctctcctcttttagcatgtcatttatatttcttaaaaacttcactttttagtgtttgtcctatagttggcaatacacatttacaactttcaaataaccatgtactgcttcacagggagtgcacatacttcataacaaaatattccaatttctccctcacatcacatcccttataacattgctgtcattcaatttaattttccattagctatgatcattcaatatattgtcatttttattaccctaaacaattatttttctattaggtcaatttagaataaggaaaatgaaagactttattttacatttattactttttggatactctttttatgtagatttgcatttctaacctgttttctctgaaaaatatctttcaacatatattaaatgtcatttttttctgccatcaaatctgtcagttttggtctgaggaagtctttctcttttccttttgaattattttgctggatacagaattctaggttattgtttttctttcaatgttttaaccatttttctccagtctcttttttttttttgcatagtttctaacaagaactctaatgcagttcttactcttctataggtaaggttgtttttgtccttcttacttccattaagattttgtctttggttttctgcagtttcagtatgatatatataggagtagatttgttggtatttatcctgcttggtgttctgtgagcctcctgcgtctatggtttgttgtctgttactaatttttttttaattcgaagctattattcatatattttacttctccattttgtatttattacatgtatacttttgtaattgtaccacagctcctggatattattttttatcctttattctcttggcttttcagtttcggaatttttattgacataccttcaagttcattgattctttccttggtcatgtccagtctgctgatgtgcccatcaaaagcattcttcattcctgctcctttttttttttttttttaattgctagcatttccttttgattttttaaatgactttccatctcgctgttgcattatttggtcttgcatgttgtctattttaaacatcagagcaacaataatcatatatattatataaaataaacatatttatcataattttcaattcccattctgataattctaaaatctttgccaaatttgagtttgattctgatgctttctttgttcagactagtttttgttgctttctaatttttcattgatagctatatatgatgtattaggatataggaactgagtttaataagattttagtatgaagttttatattaacctagctaggagccttagatgtgtttaatgtttgctgtaatgttagttgtaggtgccagaagcctcactttcccatagtttccttttttttttttttattttaaactcctctttctttggttttccccaagaactacttctttgaatagattctgtgtcctgcagctcttttagttgtaatctgcatttgttacactggagctatgttgatatggaagtaaggtgttggagagaggaaggggaaatgttctgtaatcttaaaattaaatctgattttttttttttagtctgaatttctgggatgtgacctttggaagtatttcttagccatcccctctccctgccacctatttttctttccagaggccagcgaggaaggctgcttctctctcaagtcagataaggctctggtaaaatagttttatttggagggcagacctttgttttggagaatgttctaggaatatttcaaaactgttactttgtcactacctctgtccgaaccatagccagatgtttctctgattttcaccatgaaaatatggtagtatcccatgaaagtggggaggtctccctaagactaggtccctaggagtttttgtcactgagaggaattcacactcattcttcagcagttagtcaattactatttaagtgttcctgctggttattggctccaaaggcttctgcttcaggtaacttgatctcagttgtcattctctgtatttacccattttttcagttttcagagtgatggttttccctctgtccgcagtttggtgatgtaactaagaaaagtcattgatttttcagttccttcagtttttcccttgttctgagaacaagaataatgacttccaagctctttgcaggtcaaagctgaaattggaagttcacatatttttaaatcaatattttaatgtaagaatacattgaactgaagtaagatttaaaactttgttgagttaaaaactgaaattgggccaggtatagtagctcatgcctgtaatcccagcactttgtgaggccaaggtaggtggatcatttgagtccaggagttcaagaccagcctgggcaacatggtgaaactctgtctctacaaacaatacaaaaattagccaggattggtggtgcatgcctgtaatcctagctactggggaggctgaggcaggaggatcagttgaacctgggattcagaggttacagtgagccgagattgtgccattgcactctagcttgcatgacagagcaagaccctgtctcaaaggaaaaaaaaaaaaaagccaaacaaaccacaacctaaattgatctagacttttctttggaatttaaattacatcataaacctatgctttttttttttttttgagaaaggaaaaaaaaaccattcagatactgctgtcactagagaagtataatgaaaactgtttcccaaactcttagagtttgtttagtaggtatggggctagcatctacatttcacaaactcttttggtaataactagcttaaactttattcaggggccaagcttggtggcgcatgcctgtaatcgcagcactttgggaggccacggtgagaggattgcttagagttttgagaccagcctgggcaaaaaaagcaagaccctgtgtctgttgatagcacaacagggtgactatagtcaataataatttagttgtacattttaaagtaactgaaagagtatgattggattgttggtaacaaaggatatattcttaagatggtggataccccatttatcctgatatgattattacacattgtaccccataatttatattacacttacagtgtacccacaaaatttaaaatcaataaaagacctcatctctaaagtaaaaattttcgaagtagccaggctcaagtggcgtgcacctgtagtcccagctacttaggaggctgaagcttggcaggattggttgagcctaggtagtcaaggttgcagtgagttatgattgtgccactgcacttcagcctgggtgacaaagtgagaccacatctctttaaaaaaaggacaaaactcttttcaaggagaaaaattaccaaattgtgtctttcttctgcactactataatggaactataagccttgtcttacacaattactgttcaactcttagcagggatgtcagagtcagcatttgagagcagttttgtattgaaataaagagcaatttctgattcttcagagtgattatatatgcaaacgaaggtgtctgtgtgttttattgaaatcaggacattttgaacctaatatcctgataagctaaaatactatcaattgggtaaaattggttatttattatccctaatggtttatgacagctttactctgtatacattcccttgtagcccagtgcatgtgccaccagtgcctgtgctctttacatagctgaaagattgaacttaaccacaattcaaacacacacatacacacaactagagtggtttctctacctataaaataggcctcttatgaatataagtagtatttgagaactatgaaaagttatagccttgtatttgtctaaatttaatctacagttggaatttttttttttttaactggagtgaggcaggattgcttgaaagcttactcaaagattcttaaggagcgaggtgcagtggctcacgcctgtaatcccagcactttgataggctgaggagggtggaacatctgaggtcaggagtttgagatcatcttggccagcatggtgaaacccgtctctactaaaaatacaaaaattagctggatagtggcggctgcctgtagccccagctactgaggagcctgaggcaggagaattgcttgaaccagggagcctcggaggcggaggttgcagtgagctgagattgtgccactacactccagcctgggcaacagagcaagactccatctcaaaaaaaaaaaaaaaaaaagattcttaagggttttgcttcccctgaagtagatattatgccagtaatataaaagaaatgtgcaatgaataatcagatgtttcatttgtaattttttattttttgtggtttaaattgtttttgtttttgagagagggtttcaaaacactcctaggcaggagtgcagtggcagaggatagctcactggaaccttgatatttttaaatattttttaaatatgttgtataatggggttactatgttgtccaggctaatcttgaactcttgtcctcaagggatcctcttgcctcaaccacccacagtactgggattacaggcatgagccaccgtgccttgtctggtttaagttgttttagtttactttgtttacaccagaattattattaatacgttttatcgaaatccagacattttattttatttattgaaatcaagacatttaaaattttgtgggtacattatatgttttcaatagttctttttgcttatttgcttgaaagaatccttcaggattctttctgagtatcacatattgcattagtataaggcagtgaatctttgcccttgaacttgcagttaattatactattggattgacaaattcttttctgcagtcacaagctttgtggcaaaggccaaaagtttctgcttgggctctgaggaaacactgtcattatagatccagctgaagtcaccagaacagtaaatattgtcataagactccctccaaacaggatactgatcttgcttttagattttaaaagacttttttatttttcaaaattttaattaaatacttgtgagtcaattgctgtggtattatatagtacaaatggcctagacttagaatttcaagattgcctggaatttacagcatgcgagttataaaatctgtaaaagtatatgtcactattatgtgcctttccatttgtattgtttgattattttgcttcagttgctgtgcaaatatgaaagggatattaaatattcttataatattttataattttcaataggaggtctacctatataagtactttcacatatacaattgatattcaccatttgtggattttgtattttagaattcacccacttgctaacatttatttgtaaccccaaaatataattgcagtgcttttgcagtaatttgtttacatgtgcaaagcaatgaaaaatgtgagttgcctgacgcatatgttcctagtttagatcaagcaaggtctaatgctttgccttcttgttttaattctcatactgttaacaaatatacttttttgacatttatttagtgccaatttttttgcatttttctgctttttgttagtgactttgctgttaaaaatggcttccaaatgtagtgctgaaatgctgtctaatattcagtgtaagaagattgtgatgtaccttacagaaaaaatacatgtgttagataagcttccttcagacattatttatggtgctgtcagccatgagtttaatattaatgaatcaacagcatcaaataagatatccttaaacagagaggcacatcaaggttatgtattgagggtttgatgaaaatgtgaccagaggctcataggaacctgtttattttccttaggggcagtggttcagtgttgctaattcagtgcttgagtgggctttatagaaaataactacctcaaataatgagaatagactctgcagtcagacctttatatctgtgggttccacatctgcaaatcagccaacctcggatcaaaatatttgaaaaagaaaaaccaataaaaattaactgcaattaaaaaaatacacattaaaaaaccaatgcggtataacaattattaacatagtatttacactgcatttggtattataagtactctagagatggttttttttttttttttttttgagacggagtcttgctctgtcacccaggctggagtgcagtggcgcagtctcggctcactgcaagctctgcctcccgggttcacaccattctcctgcctcagccttccgagtagctgggactacaggtgcccaccaccacgcctggctaatttttttttttgtatttttagtagcgacagggtttctccgtgttagccaggatggtctcaatctcctgacctcgtgatctgcctgcctcggcctcccaaagtgaggtggttttaagtatacaggaggatgtgcatgggttacatgcaaatagtatgccatttcataagggatttgagcatccacagattttggtaaccatgggaattctggaaccaatcccctgaagacaccaagagataaatgtacttcttaaattaagggattatttaaaattaacaatgacataatctttaaatgattatttgagatcaagtgattagtaaattttgggcagttgagaagaggaaggaaattatttacatgtgtacagaaaccatgaaagctagagaagcaggaagcatgtttagttaacattgctgcctaacaaagacgaagtctttagatttttatatagaccctaggcatatcaaagaaaactaaatcatgcctacagtttcctcccaaccaaaagagtctttcattgtccgggcactgggaaaaataaggggacagactgggaaaaataaggggacagattactgaaagtatttgcttttcttaccattgaatgatagggcacaattattagtggagaagaaagaaatgatttctagaataaaccattacttctagatttttttttttttgagacggagtcttgctctaccgcccaggctgaaatgaagtggtgcaatctcagctcactgtgacctctgcctcccaggttcaagtgattcttgtgcctcagcctcccaagtagctggaattacaggcactcaccaccacacccagctaatttttgtatttttagtagacgggattttgccatgttggccaggctggtcttgaactctcaacctcaggtgatccgcccacctagacctcccaaagtgctgggattatagatgtgagccaccgcacctggccattacttctagattgttaatgacaacaacatagagttgtatatagtgagaagcactgttgcgtaattaatttctttgccttctttatacttgataacactctgaggccatagcatatataatacttttaaacaaatataatactaaaatactaaagcaaaggctctcattggaccactaataccagtgtttgtgatctggctctgtgcaatgacacatggacttatagtagacggtaatatgctgaagaaactcatgaaaaagtcttaaatgatcagcatatttatttatttatttatacattgtttcttttaatcaaaaagtatatgcacatgattaagaaacaaaaatttctgaaaggtccaataattaaaaataaatgaatcctatcctactcaccccattcttcccagacacattctctttttaactattatttcttgttatttacttccatattattaaaaagtatacgaaatgttgctatttcctcatttatcagttttagatcatatttattttctgccatgatatatgggtttatacctgtttcttggtcctttatggtctcagtattgttatagcaccatcatgttcttcggctctggtaatttttctgctttcttttacaatttattctgttttctctctggaatccgtttttttttttttttttagaaattggcactcctggattgttctgtgttccttttttttcatattttccttctctttttgtgaatgttttgtttttctatcccttctatgctttttttcatttcagcaaatctttgatgctttcttatttttggataatccttttctttgaaaattagattctctaccatactctttaattttaatgtacattagagttttgtttaaaagttttcttccattgtttgcattatttctgttttcctctggagtcattttatatgggtgagtatgtgtgtgtttctgttcttgtctttttctctgcttggaggctttctctaaatatcagtgtttttggttgcgctctgtagttgagaatgaggtaacaaactgtaggttaggaattctgtgcataatcaggcttttgactggagaccttcacttcagggcagtgtttttcaacctttttttattatcattacctgaagaagcatatttagatatttttcccctaatctctgctccttcaataccaccgccccccacaatcccatgaagatttaacactacaagatatactctatatctgattatatactctgaaagatacaaatgccaggaagagtttggaaaaggtcattcctcggggccattcaactgctatatctgctctctcctatctgtagtcattttctggggaagtggagaggaggtagggagctgccaaccatttatggactttgaattagtctcccaattttcagtactgtatcgtaactcctgtcatgactttcccaaaaatttgtgagtcttgagcctcatcttgctttagtggggcaaattagctctcctttgtccatgtctccctctgtgatactatgaccttataactttctctactctgctacttcaatcacaattccaccatatgtttgtattccagaatttcatgaaatctctaattttaattttcagtaatagttccttggcaatttttttaaaattaagtaatttattttttaaataatagagacagggtctcactgtgttccccaggctggttttgaactctgggcttaagcagtcctcctgccccagtctcccaaagagctgggattacaggtgtgagccaccacacccagctggttcttctctaattctatttgttgcactagtttatctgttttcaaatctttaggtggtgttcatttggggcctcagaaactgaagagaggataaacatttgtcttcaattttccatcgtatctggacacctgtaataagctttaaaaacaaacattttcatatatgcctagtttgtattctagtcatatttgctctataaaataactttttgtttattttaaaattcttagcaatgattatatgttctacagagagctcattaaagtgacctgttcttattgtttctatccattgtaatacatcatgtttatattgtttcaaattcaacaaaatttgtagaggcaagataattcttctcttttttggctcctaggtgttaccagacagtgatactgaggttggtattagaatttatggaaatctcagagaactttctagagcagtattgcacaataaaatctcagccgtcagccacatgtggctatttaacttaattaagataaattcccttccttagtcatactggtcacatgtcatgtgttcagtaaccacatacagctagtggctaccatttcagacagtgcaggtttccatcattgccaggttctactagacagcattgttttaaaaagtagaaagtaggacaccattctgtagttctccaggattgactagtttcttaagcctcaggcttttgcaggagttgcttagtctagtaaatgtatagggctttgttaaatagataatgatgtaaaaagaaaataattaacatcttgaaagtatgctttgaagccttcaggagaaagtacaagtcacaggactagctattgtctaaattagtccaagagacagctaagaaagcactgtgctaattgtgtgataatctttttttgtgttgattcaaggaaacactgtagaaggttgagagagtcataaaatgtagcatgtatgtatactgttctcgctgtccttaagaatgttaccagagtcttagcataggcaacaaaatgatgcagataaactgttgttttgagtgggtagatggataagctgttacctcatttagaatattttctttttgtacatgtagttgattatttgcggtatatttaagtacagcataccccgtagaaatgtggagctggaatgggctttagaaattatcatcgtatcctttcattttacaggtatgggaaacaaatgcttaaagtagggaaataatttactctagggcacacagtcactggtggggagagccaacaccagaaccaacatattttgagaacatttcccatggtactgtgttgttgacaaggaaagaaggacttggtccattgtctttcctcaaaagctttaataatctagatgtaaggaccaagctggcaatataaacttaaaattattttaagagtatgtaactcttggaactatacatttcataatgtgtcttcctctttttagaacaacaatttgtaatctttacacgatgccacgaattggagaacctgtctggcttacaatgatgtcggggactccagaaaagaaccacctttgctatcgtttcatgaaggagttcacctttctaatggaaaatgcttccaaaaatcagtatgaatttatttattataactagatatctagattgtaatcaaactcaattacagatgtggaagaatcatccattatctttggaattattttatattattaatcaaaattaataatcagaattctaaaaaataattaaatgatagggtatggaagagtattacagaaccttatgaatgaaaagcagtgaaaatgtctgtaattatgtaattaaaattcctgacatattgtagaattatctgaggctgcccatttttttgtgagttgtatccatttatagttttatttcatagaaaagaggtagaaaacatttaaggatggccaggcgtgatggctcacacctgtaaccccagcactttgggaggctgaggtgggtggatcacgaggtcaggagatcgagaccatcctggctaacacggtgaaaccctgtctctactaaaaatacaaaaacaaaattagccgggcatggtggcgggtgcctgtagtcccagctacttgggaggctgagacgggagaatggcgtgaatccaggaggcacagcttgcagtaagtggagattgcgccactgcactgtagcctgggtgacaaagcaagactccgtctcaaacaaacaaacaaaaaaaacatataaggaaatggtaggattctaatgatgcattttcaatgtgatgttttatcgtattgtattattttaactattcaagtctttggaatccagatgaataattcagttgtttttattctctttgatgatagacagagtttgcttaatactttgcctcgttttcccattcagtaatttggaaatgtaaggacctgctggttgattcagtaattaattgtgtgattaaacactgaaaataatccataatttttgaagtaaaatggcatttctgttttgtacttatgatctgcaatagctcttatgaatgtgttatctttatttcaagtagtttttaactcctcctcaaccagaaactattaactttcattttaatcttggtgttatatactcatcctttcctctctcttctcctttttttggtgccatttggccacatgaacatatatactccccttgcttactttttcactacattttacctaaggtttcatgaagactgattggaatctgatcagatgtattttgttttcagattcttgccagctctcattactgcagttctgaccaatcatcttgcctgggttccaacagtcatgccaaatggacaaccacctataaaaatatttttagaaaagcattcctctcagagtgtggacatgttggcaaagactcatccatataacccactttgggcacaactgggtatgtaatctgacaactgttacactatgtattagacttttttgtagctatctgtaattattttatagcaaaaccaaaaataaataaaatgcttttacctcctgcattctaaagcatctctgctttgcttgtcctttcatgtctgccaatttgtcttatcctcgtcttagacctgaaatcattccttatagatgaagaactgcaggtagagcaagaggagcaggctgatagctcgtttactagtaacttcagatcttcaggatgttttatgattttgtactttgtgttaggtactttgcaagaaagaataaatcaacagtcaccggtgatacctaaaatcaatctggttaggagtgaagcaattcactgaggtttctgttgatccacttttgttcacttgctgagtcattttggaaaatgtttccctcagtgttaagcaccactaaacaagtcggggaacagaggggagagtagatggttgataagttcatagacaatagggagggattgtaccagggtgctaaagacacaggctgtggagtcaggcacaccacatttgaatcacagtttccttattcataaagtaggaataatagtagatgatacatactttaaaagttgtaaaaattaaaagagataatacatgtaaaatggttgagactgtgtctcgtaaacgtagctgctaattacctctgctcctactctgttgcttttagatgatgggggaagagtaagatgagaacattttggtgactgggtagtaactttccttaggttgctctgtgattgagcttgccaggtggattgtcatatggcaatatgtcatatgacatatatcaattcatataaccaacctccatccctactggctttctcccttgttccctcccccattcccttccattttattgagttataattgacatacagtaaatgcatttttttaatgaagtctcactcttttgcccaggctgaagtgcagtggcacgatcatggctcactgcagctccaatttccctgggatcaaatgatctccctaccttagtcacccaagtagctgggactacaggcgcgtaacaccacaccaggctagtttttgtatttattgtagagatggggttttgccatgttcccccaggctggtctcaaactcccagactcaagcgatctgctcatcttggcctcccaaggtgctgggattacaagcatgagccaccacacctggcccaacacatatttaaagtacacagtttgggctaggtgcagtggctcatgcctgtaatcctggcactttgggaggctgaggtgggtggattacttgaggtcaggagttcgaaaccagcctggccaacatggtgaaaccctgcctctactgaaaatacaaaacaatggctgggcgcagtggctcacgcctgtaatctcagcactttgggaggccgaggcaggcggatcatgagggcaggagatcgagaccatcctggcttaacacggtgaaatcgcatctctactagaagtacaaaaaattagctgggcgtggtggtgggcgccagctactcaagaggctgaggcaggagaatggtgtgaacccaggaggcggagcttgcagtgagccgagatcatgccactgcactccatcctgggcaacagtgcaagactctgtctcaaaaaaaaaaaaaattagctgggcgtggtggcaggcgcctataatcccagccacttaggaggctgaggcaggagaatcccttgaacctggaggcagaggttgcaatgagccgagatcatgccactgcaccgtagcctgggtgacagagcgagaatctgtctcaaaaaaataaagcaatttgataagtttcgcatatatgcctctgaaaccatcaccacaatcaaaatggtaatcatattgcatcacttacaaaagtttccttatgcctttttgtaatctcttcctcctcctcctcctccccatctccttctccccaacttctctgttcctcttccaccatccctaggcagccactggcctactttctgtcatggtagattacttgcattttctagagttttatatgaatggaatcatgcagtatatactttctttgatctcattcattcaatataattcagattcacctattttgtatgtattaatggttcattcctttttaatgctgagtagtattccattgcatggacctttttaaaatcaaattattagtagtattttttaaattgggacatttaaatccttttttaattctacaatcatttgttgactgtctaggctctgtttaaaaagcacagaggctgtaaagatgaatgatttggaaattgccctcaagaagtcgacagtctaagactgtaggtaatatatatgcagacaacaatgataattcaaggaggaactataagagaaatgaaaagtttagtgagagttcaacaggggagcctacttttgtccaagtgaggatgcttaggtgggaagctatggactggcagagatattgaggaaagggacaggacatcacatgagtaaagagtctaggtgttaaaagtgcagagcatattcagtggtccagtttaactggggctttgtgcgaataaggatgatttcttcttctgactgccaagaaggaggataagtataagaaaataaagctggaaaagtaaagtgggaatcatgaaagactcacttgccatgccaaagcaatttcaacttacttggtaatttgtgggaattatgggagtagtttagaacagtggcatggtgatatttgagccagtgtgttagccagaagagaaaatttatcataatagtatctatagcttatatttatttgagacctatttatatttgttcctttaaaaagtgtgagggctttgtaaagtaaaaatagaggattttaaatgtgtatactgacaacttcaaaaattgaattaagttgaaattaatggctttgtattctcctttttttttctttctttcttgagacagggtctcacgctattgcacaggctggagtgtggtggtgcgatcacagctcactgcagcctcaacttcctgggctcaggtgattcttccgcctcagcctctcaggtagctgggattacaggtgcgcgccaccatgcccagctaattttctgtatttttttgtagagacaagggtttcgccatgttgcccaggctggtcttgaactcctgggctcaagtgatcagcctgcttccacctccccaaatgctgggattacatgtgtaagccaccatgcccagccctattctccatagttttggcactgaaattactggtttaatttgaagtatagcataaatatagaaatgctaatttctagtcctgcccccctcacctcccctgcttttaacataatggctagtcatgtttagaatggatttaaaagtgaaaatgaactgcatggctgaacttgttgccctttcttttccttttagtaaggatgagtctctctcttcctgccctttctggcctatcctgagtacccaaccctctagggaatggaaggggaaaataggcttttacaaacatgggagctggtggggtggggtgctggctagaggaacaacagttaaagttcagagatatgacttacttttttattttatttctttttattttttattatttttatttttttgagacggagtcttgctcttgttgcccaggctggagtgcagtggtgtcatctcggctcagtgcaccctctgcctcctgggttcaagtaattctccagcctcagcctcccaagtagctgggactacaggtgcccacgacaccacctggctagtttttgtatttttagtaggtacagggttttaccatcttggccaggctggtcttgaactcctggtctcaagtgatccacccatctcggcctctcagagtgctggaattacaagcgtgagccactgtgcccggccccagagatatgatttaaatcaggaatggttaagtgtgtggtgtgacgactatagctttgctccattttaccactactcctttcctctccttgcaagccagtggatattgtgctttgtcttttcttgattggacacagctacagaatccttgtgtacatagtacttcaggcagtacttctctaacaaggtaaaaatgctctgcatggagcctgggttagagaatattcttgggatatgtgagtttcagaactgactctttgcttgaggtttctgaaccatagcatttgtttaaagaggaaaccagaaaacccttaaattcacctttctctctggttaagattattcatctcatcttcctcccttgaatagtcactcatctgttaaagaactaagagtgaggccaggcatggtggctcacgcctgtaatcccagcactttgggaggccagggccagtggattgcttgagcccaggagctcaagaccaccctaggaaacatggcaaaactctgtctctacaaaaaaaaaaaaatacaaaaaattagccaggcatggtggcacgcacttatagtcccagctactcaggaggctgaggtagcaggatcacctgagcctaggaggctgaggctgcagtgaaccatgattgtaccactgcactccagccaggattacagtgtgagaccctgtctcaaaaaaaaaaaaaacaaaaaaacgagtaaaacctaaactattactcatacagtaaaagaagtaggtttctgatcattaaaaatagcttacttagctgtgtcagtaaaggacatgtccaataactgattttttccattacaggagacttgtatggcgctattggctctcccgtacggttagcaaggactgtggtagttggcaaacgacaagacatggtccagaggctactttattttcttacttattttataagatgctctgaacttcaagaaacgcatcttttagaaaatggagaagatgaagccatcgttatgccaggcacagtaattactaccactttagagaaaggtgaaatagaagaatcagagtatgtccttgtcacaatgcatagaaacaaaagcagtttgctctttaaagagtcagaagaaattagaactcccaattgtaactgtaaatattgcagtcatccactccttgggcaaaatgtagagaacatttcacaacaagagagagaagatattcaaaacagctctaaggagctgctaggaatttcagatgagtgccggatgatttctccttctgactgccaagaagaaaatgctgttgatgttaaacagtacagagataaattaagaacttgctttgacgccaagttagagacagttgtttgcacaggatctgttccagtagacaaatgtgcattgtcagagtcaggcttagagtcaacagaggaaacatggcagagtgagaagttgctggattcagacagtcacacaggcaaagcaatgagatccacaggaatggttgtggaaaaaaaacctccagataagattgtgcctgcttcattttcttgtgaggctgcccagacaaaggttactttcctgattggggattctatgtcacctgattcagatactgagcttcgaagtcaggcagtggtggatcagattaccagacatcacaccaaaccattgaaggaagaaagaggggctattgatcagcatcaagaaactaaacaaacaaccaaggaccaatctggagagtctgatacacagaacatggtttctgaagagccctgtgaacttccctgttggaatcattcagacccagaaagcatgagcttattcgacgaatattttaatgatgattcaatcgaaaccaggactattgatgatgttccatttaaaacaagtacagatagtaaagaccattgctgtatgttagagttttcaaaaatattgtgtacaaaaaataacaagcagaacaatgaattttgtaaatgtatagaaacagttccccaagattcatgtaaaacctgctttcctcagcaggaccaaagagatacactctccattcttgtcccccatggggataaagagagttcagataaaaaaattgctgtaggaactgaatgggacattccaagaaatgaaagttcagacagtgcccttggggatagtgaaagtgaagatacaggtcatgatatgactagacaagttagcagttattatggaggagagcaagaagattgggcagaagaggatgagataccttttcctgggtaagtaggaagttttcacctataatgggccctatataaatatgtaccattctcttttttagctgttctctgaaggttagtataaaagagatcattgttctggatagctctcttgttttcatattctcttaactcataagaaggagtaaaggctaagctccagaaacaccctggaaaggttttatgaagacctcaaataaaagttaaaggatctggttgataagtataagatttcttactgcttagaaggtttcaagccatttaggagtgacttatgccccccaaaggacatatgctgagcctggcagttagggagcactaatccctgagatgttagaatagctgttagaaatagatttggccaagactaagaggaaaacagagaatgtatactttgggtcaagtatgcaaggagaatattcatgcttgagaaacattacatacctagctttggacttgtgaggcatttaattgttttgttttagatgattgttttcataatctgattgtattaagaatgtgctacaaacacaaggtacaattctcttaaagtctcttaggaaagattgatcctcacttcattactcagttgctcatcagaccttcttctctgaataagaaggagtattttattttctgatagagcacttgagccagtttttaaataacgatgattttactcttgattttactattattaccattttactcttaatttttacgattgttaccattatataaggatgattttacacttgattttaatacagactagtgtaaaatatggacaagtagaattcacttttttttttttttactggttaaatatatttattactaaataaatgtcttttgggggcatttttcttccaggtcaaagttaatcgaagtgagtgctgttcagcccaacattgccaacttcgggaggtccttgctgggtggctactgctcatcttatgtgcctgactttgttcttcaaggaattgggagtgatgagaggttccgtcagtgtctgatgtcagatttatctcatgctgtgcaggtgagtgaccttcactgtttttgagtttatttagaagaaactctgttaagcagcagaacccaaaattgccttatatttttggtcatactttttacaacacaatcattgttctctgaatccatcattttatattcagtgcccgtatctttgtatctgtcactgtgaaagcaaataaagttccagaaatctatccacatggatatctgaaatacagaaagtactttatgtattcatggatgtccatcaactaggttatttatagtatcaaaaatttgcaagtgcttaagtttgaatggaattattttcttaatttccttttcagattactcattgcttacatatagaagtggggttggcttttgtgtattgatcttatatcctttggtctttctgaaactcttattagtctattcatttttctgtataggttccctaaggttttctacacacaggctcatgttatcagtgaacagatagttttaaatctttcttaacaatctggatgccttttgtccccgctgcccccaacttttttttttttttttgactcattgtactggctagaattttcaatacaatgttgcatggaagtggtgaccatggacatcgttgccttattcctgatcttaggggaaagacattgcatctttcatgattaagtatgttgttagttgtaaggtttttgtgatgccctttattagatggaagaagttccctttttatttttattttgtttaaccgaatacttcttttagagacaggcagttctcttttattcctagttttgagacggtttggttttttttgtccatcccttaatcatgaatgagtgtgggattttgtcatatgctttttctcaatgtctattgagattgtattgtcgtgtcatttttcatctttaaactattaatgtcatggatttcattaattaatttttagatgttaaaccaaccattgtattcctaggaagcaatccccactctgtcatggtatataattttttttatgtgttgctggatttgatttaccaatattttattatggacattggagtctatattcatgagaaatattgctttttagttttcttgtgatgtctttgtctagctctgatatcaggataatattggcacatcctctattttctggaagagtttccagaagattagtactactttttttctctaaacgtttggtagaactcactagtgaaaccatctgcatccaggcttttaagaataagaatattttaaattgctaatttaatttcttcaccttttatacatttagattttctatttgtttctgagtccattttggtaatttttgtcttttaggaatttattagttgcatttaagtggcctaatttactagaatcaagttgtttatattatacacttacaatccttttagtttttataaggttgctagtgatgtcccctcttttgttcctgaattttgtaatgtgtgtttttgtttgtttgtttttcaaatggtgagggcttctccaaagagaagttcattcgtggtttcacttaaattgtatatattttttgcccatatacatcaaggattagcaagctatggacagtgggccaaattgtcctgctttttatagatgaagttttattagaacacaaccacagtcattcatttatatgcttctggctatgttcatgcctaacagcagagttgagttattgagacagagacttttcagcccccaaacctaaaatatttcctgtttgttcttattttattttatttcatttttcttgagacagagtctagctctgttacccaggctggagtacagtggtgccatctcagcttacagtaacttctgcctcccaggttcaagtgattctcttgcctcagcctctggagtagctgggattacaggtgcccaccaccacacctgcctaatttttgtatttttagtagagatgaggtttcaccatgttggccaggttggtctggaactccgacctcaggtgatccacccacctcagcctcccaaagtgctgggattataggcgtgagccaccgcacctggccaaatctgacaaatttcgatctgttgtattttcagtttcattcatttcaaaatgtttttacattttgcttgtaatttctttgacttatgagttatttagaagtatgctgtttaatttacaaatatttatggaattctcaaaagttgttttgctgttggtttctaatttaattccattatggttggagaacctactttgttcacctcttgtaaatttattgagactgttttatggcacttgaaaagaatatatattctgcttttgttgaaatgttctatagctatcaggtcaagttagataacctttagataatagtcttaattaagtcttttatgtccgtgctgattttcagtttgtttctgccatcaattattgagaatgaagtattgaagtcttcagctattgtttggttgaattttctatttctcccttcaattgtacatatcactttaatactttgctttaataacaaaatctggccacctctcaatttaaaaagttaataaagaaatagagaggcccggaatggtggctcacgcctataatcccagcactttgggaggccgaggtgggtggattacttgaggtcagtagtttgtgaccaccctggccaacatggtgaaaccctgcctctacaaaaatacaaagattagctgggtgtggtggcatgtgcctgtaatcccagctgcttgggaggctgaggcaggagaatcacttgaatccaggaggtagaggttgcagtgagccgagatcacgccactgcactccagcctgggcaacagagcaagacaaccatttcaaaacaaacaaacaaacaaacaaacaaaaaaacagaagtgaagaaagccaagtgggaaattatggatgagaaaatgtggcttagtgagcaacagtcaattgttagccaataaggtttaaaccttctgtgtctgtagaaagttacctaagttgtaaagtttggtgttttattgtatagtagagaaattatggcaaatatagataaaaacaatttgtgagaaaaacttatcagaacttgtgatcttcatatttaaaggctagtttgcccagcttttgaataccaatcaaataaatatttattgacctactgtgttctgaatatagtgccagtactccaagggatatatgtatgaaaaagaaaaagtttctgacttcaagtttttaacttagcaacagagaaaataaggccaagtgtatgaataaatgtagtataaaacataacaaaagtagtgcctgaggaagatacttgaatgtattattgcttcaaaggacagattttttatcagttggtggtatggatgcccttcagggtaaaggaaccgtttctagttttttcaatgcttccctcccaatacctgatgaagtgcctattatttgttgaattacttggttaaggaattgtatatgagttcttctaatgcactctgtgtcttctaatgcattcttatctttctttatgtctgatcctagttgcttagtctcttttcttctttcatctgtacccatcgccaaacacagtatcttgtgactttctctgtgaaagcctggcgttggaaaacattgctgtctcctgctgaagataaagacaacattttgattttaagggtttcttcctgctattataggatgaataataataatagtatttagtttttattgttgccttactgtgtcccaggcacttaagtgtactatttcacttaatcttataataatcctttgaggtacttattattgttatctttgtgtttcagatatggctcagagaagtttttaagttacatagatggggaatggcaaaactagaattcagttcttaactgcctgttcttaagctgctatgccatactgttactaaaactgatgaacaaagagtaatacaaatagcaaaatcaccattacaaagttataagacttttatattagtggtcccaggtctgttgctcttggattccttccactatggtaaaaaggaaggagctatttgtctttccccctctgttttagtaattgggtttctagtctttccttctcatattttcatttagtcatgtaagtatactatcaaagcactattatagaaaaatttgacaaaaagaaaaataaaataccttcaatctcagcactgacaagttgttgaactttgttatcaatcatttttccaaagcatgtataggatttctaaaaaaattatttggccaggcacggtggctcacagctgtaatctcagcactttgggaggccgaggtaggcagatcatgaggtcaggaaatcaagaccatcctggctaacacagtgaaacctcatctctgctaaaaatacaaaaatttagccaggcatggtggtggagctactacggaggctgaggcaggagaatggcctgaacccaggaggcggagcttgcagtgaggtgagatcacgccactgcactccagcctgggcgacagagcgagactccgtctcaaaaaaaaaaaaaaaaaaaaatattattttaggccaagcgctgtggctcacgcctgtaatcccagcactttgggaggccaaggtgggcagatcatgaggtcaagagttcgagaccagtctggccaacatagtgaaaccccgtctctgctaaaaatacaaaaaattagctgggtgtggtggtgggcatctgtaatcccagctactcgggaggctgaggcaggacaatcgcttgaacctgggaggcagaggttgctgtgagctgagatttcaccattgcactccaggccaggtgacagtgagactccatctcaaaaaaaaaaaaaaacctatctatatatatatatattttttaatccttgcatacttaaagtttatcatatttaacatgaaatttttttatgtgactacatggaaaaacatgtaggaaccttttaatatataaataatggaagtgatactttaaaaaaatacagtcttctgaattataagaggagagtgtcttttctttttctccctgatttttaataaagtagcatttttcttaatatatatttattatacaaaatgttgaaatgtgaagaaagccaaacacaaattttcctaactctaccatcagctattcttatacagaaacttcctccaggcattaggcagcattgtggcttctcataaaacccagaattggccacttattgccggtatatcataagacagaatacttactctaggaaagcctcagtttctttggctataatgaaagtaatactgatgtttgtttaccagacttacactgtgtggtgatattagtcacactgtgctttgcatcttcttgttatgattattattctgtatgtatgtgtatttatatatcatatatatgtctgaagccttatatataaaaagatatgcttgtgtacatctgtgtaaatacacaatatttacacagataaatacacaatcatatcattttatatataaatacacagatatacacaagcatatctttttatatataagtatatatttttatatagctgagtccttatatataaaatatatgcatgtatatgtatttatatatacccatatttttatactctttatgattttatattatctgttttaaattctgcttttgttacataatagttaatgtaagaatatttccccatactaacatagtgtgtaaacattatttttaatgtatatggattattgcatggttttgtcatagtttatgtttctcaccattctcctattgctcttttttttttttttttttttttgagacagggtcttgctctgtcatccaggttagagtgcagtggcacgaacatggcttactggagccttgaactcctgggctcaagcaatctcccatctcagcttgcccagtagctgggactgtaggcacatgccagcatgcctggctaatgtgtttattttttgtgaagatggggtctcgctgtattatccaggctggtctcgaactctggagcctcaagtgatcctcccacctcggcctcccaaaaatcttgttctaaagagaaagccaagtttcacctttgcattagtgtattagtaacattaaacccaattcttaataaaaccttataaacaaactgattcaatcttagtttaaccataaggtaaaattttaataaaccttttttaatcttttataattttctgttaagcagtagatcaattcactaagaaaaccatgttattcagacatgtgagcccagattttggccctgcattagtgtgctcttatttcagtgttcaacatacagaaaaattaaataatccccttcaaatcttagcaaacttgcttatacctacagaacttcctttatgagatcaacccttcacaaaccctctacaccttgcttaaaccttcagttttgtcccattactcttttaggttaagacaattgttaaaaccctctgagctagacaaaatttcattccctttaacaaaaaccatattcccatgccttcttatagcctcccatcaaaaccacattcttttttccttctacaccttgtatataaaactgtttttccagtagtctcaagtgcatgctgcactgttaacttttagcaaattttatttttggtgagaaacctagtaaacaagcaattttaaccatgtataatattgcagaacccatgacttttcccagcctagccaggggacctgcctaactccatatgtctccaggccttacctagaatctattggctgtagaacagacaaacaattagtaaaagtcacagaagcagtttatcaccttaaagcatccagcaaacagtgtttgacctgccaaatttagactaaatatataaactttgaagacattttcattttactttaccaataatcttcttttttatttacaaaaagattattagagtcatgagacctacagggattaaagtttccatttttctgacaatgtttgattcaagcgcttatttttctttaagccaattaattggagctgtatatataaacatcacacacatgacacatataaatacacagaaacagagaatcaagaaaaaattccattgactgagaagcttttgaagggaaggctggagctttcaaacaatatctgtatatatagcccaaatatcagctatttaattaagtcgatttctaactgtggagctctcaagagaaaaattcttttaaaatcttttattaccagatttcagtgaggacaaactctgacttctgaatccttttactagaggtaaccttctatgtgaaatcaataagccttaactaaggggatgacttaaacagggatgtaggaggtgtctccaaagagatggtaaatgatttataagatctagaatatccccaggccagccgcggtggctcacacctgtaatcccagcactttgggaggccgaggcaggtggatcacctgaggtcaggagttcaagaccagccttaccaacatggcaaaaccccgtctccactaaaaatataaaaagtagccatcaggcacaatggcgcatgcctgtaatcccagctactcaggaggctgaggcaggagaaccgcttgaacctgggaagccaaggttgtggtgagccaagatcgtgccactgtactccagcctgggtgacagagtgagacaccatctcaaaaaaaaaaaaaaaaaaaaaaaatctagaatatctccaaaggtagttcagagaaaagaaaattcaagataagaaatgagaagctgtgcatggaagggaaaagaatcaataaatggcaaaagttccacaagtattaaaccaaaaaggacttgctcccaaagcctggaattgaacccaagccacccaccactgtgggagggcaaagcctttgcaactgacctacagtacaaggtgactgctgttgtctttcccagaaggagtctagagcattttcaagcttgcaaaggacttcaactgctcaagagaattttctaagactaaccatgtcattattatgcatctttcttttaatttaacctttttctttcaatgaggtagtcagttccaatagtgacacaatctaagaagcctattaaagtttagatgataattttccagttttttttttcctttctttttacattagaagcaaaaggtatctagggtagaagaggcatctccatgatccccaagaattcactctcagaaatgggcttaagatagcaaaagatgacaaatgccctatagagatgggaccttttcagacaaaactcacccaagggcttgacacatttgggatgaagaatgtgctgactcatctcagactcccagccctttcggattgggtgcctgacatgaacttgaaaattcctgttctctggatggtggagaccaagagagagtatccccacatggtcacaaagtcatgctctcaaggatgtaaaacaagattagagggaagcctcatttagtttttgtttcagggacccacagcaaagtttataactgacccatcgaaaagtacaccagaatcactacagcctcagattagcctctcacagatcctttttcttattaataaacagtgatttttaccattcacttatctaatttgcacagagagagagaggccagaagcctcactggtaagaaattcttaccttttgttggcacggcaggtttctgatttccctttccctcagctgccctggcgatgttgctcaccgcaccatagtcacaaaggaaaattacttttgtgtgtttcattgaaccataggcaaaaacctctcaactttgtaagatgtcacccaataggctgtgtgggggagcgagggagaggggcgagagaccatcaaattaacattctttatctcagcttggtgaagcacacataacaaaacagacactagtcactttgctcagcacctaatactgacttatcaaggctcaatctttttctagtgtgcccctgtcatctttgatcccctcaaggtagggagggatgacctctgactgggaattcactgggtgatgtctggacaacatgaagagcagacagtcaccccaggtcaaacctgttgaacttcctttactgctcagcaaatgtgaccaaataaggttctccgagttaggtctgctggacttccatcaccaattcctttagagatcccctctagatgtacaaacacacacacacacacacacacacacacacacacacaacaaagacaagacggacagaaggtctcccaaagcaagatccctgagcaagaattctaagagtatgcttctattctctgagaaacctccctgaaatcttcctgattgaggagaagtctccccaaccaagactcttcctactgattagggagagccaattgaaaccgccaaaggggccaaacttagatcccttaagaagccaaaccagtcaggagaaggaaggaggcattggcaccacctagaatacccaccagaccagtttagagatgtctttacaggaacaatttctctactgcaattgaatccatgcaccatgggtcagcagtgtgttgctggtagagatagtgccagcgtcagcccccagtccaagagaactacgcagccacttgggctggcctctggatctattgccggtgggggactaccacaccgtgggcaggtagccacaagggtgatcccagacgagcccccaaatttgtaactgcccaggggttcttcctgcccactgcataaagactatggtattgtagtagagaaaaagttcaatagacacaaggccagccaccccacatgggagatggagttcatactcaaatcatctccttcaaagcttgtaggttagggatttttaaaaggcagtttggggaaaggggtgcggtggccaggtaacaggtgcttacggctgatttgttggggcagaaataacatcatagggggttgaagctatcctactggggccaaatcgcttctggatggggctacaggagtgggttgtcagtccaggtggagccaagggtgtcagacatgcaaaaaacctggaaagatatctcaaaatgccagtgcacaatagtggtgttatttgcagttgggaaagtttcatttcttataatctccagaataatgtctgtgccttagcagaactcaaactcctctcctactttcagcctgatggcttccttttagctttacaaaagcagttgagttttgggcaaggcctattatcatttaaactgtagcctggaccaccaagactgtgtccaccctgcaagcacagagcctcaccctcaccactctgccgcccatccacacctgccaccagttcaccatggataatgatattgctgtgcttgtcgtcgacaatggctctggcatgtggaaggtctgcttcacgggcaacgatgcccccgggccgtcttcccctccataatggggcacccgaggcaccagggtgtgatgatgggcatgggtcggaaggacttctatgtgagcaacaaggcccagagcaagagaggtatcatgaccctgaagtaccccatggagcatggcatcatcaccaactgggatgacatggagaagatctggcaccacaccttctacaatgagctgcatgtggctcccaaggagcaccgtatgctgctgactgaggtccccctgaatccaaggccaaccacaagaagatgactcagatcatgtttgagaccttcaacaccccagccgtgtatatggccatccaggccatgttgtccctgtacacctatggctgtaccactggcattgtgatggactccagcgatggagtcacccacacagtgcccatctacgagggttacgccctcccccgtgccatcctgtgtctggacgtggctggccgggaccttactaactacctcatgaagatcctcaccgagcacagctacagctttaccaccatggccgagcgggaaatcgtgtgtgacatcaaggagaagctatactatgtcaccctggactttgagcaggagatggccacagcggcctccagctcctccctggagaagagctatgagctgtccgatggccaggtcatcaccattggcaatgagctatcctgctgccctgaggcgctcttccagccttccttcctgagcatggaatcctgtgacatccacaaaactaccttcaactccatcatgaaatgtgacatggacatccgcaaagacctgtacaccaacacagtgttgtttggcggcaacaacatgtaccctggcattgcgaacagggtgcagaagatcgtcactctggtgtggatgggcagctccatcctggccttgctgtccaccttccagcagatgtgggtcagcaagccaggagtatgatgagtctggcctctccatcgtccatcgcaaatgcttctaggcggactgttacttagtcgcgtttcaccctttcttgacaaaacctaacttgtgcagaaaacaagatgagattagcatggctttatttgtttttttgtttttggtggtgattttttttttttttttttttttttttttttttggctagacccaggatttaaaaactgggacagtgaaggtgacagcagtcagctggagcaagcatcccccaaagttctgcaatgtggccgaggactttgattgtacattgttcttttttctaatagtcattccaaatatcgtgaaatgcattgctacaggaagtcccttgccctcctgaaagccaccccatttctctctaaggagaatggcccagtcctctcccaagtccacacagggaaggtgatagcattgctttcatgtaaattatataatgcaaaattttttaatcttcaccttaatacttttttattttgttttactttgaatgatcagcctttgtggccccccttttgtcccccaacttgagatgtatgaaggcttttggtcacccttggagtgggtagaggcagccagggcttacctgtacactgacttgagaccagttgaataaaattgcacaccttaaaaaaaaacaaaaagctgtagcctaaatgtcttccgaagttagcttggccccataccccaggaataattaagggaaaggccaaaatgggttttgggttagcttagttcactgttataatgttctcactaatataacttttgcaaaggcggtttcagtatcatagaagggcccatgtggtaaaagaaataaaaatcagtcttgaataatatgaacccttctgctagattgtctaacgtcaatttgttttttggccttgctgcttctacgtcttgttcctcattgtctggcactagtttggaagcactcgtctctatcgagttgtcttttgttcattcctctggtatggtgtctgttagctcttgaatttctgcaagatccatatctttttttttttttttttttgagatggagtcttgctctgttgcccaggctggagtgcagtggcgtgatcttggctcactgcaggctccgcctcccaggttcatgccattcgcctgcctcagcctccccagcagctgggactacaggcacacactgccacacccggctaatttttttgtatttttagtagagacagggtttcaccatgttagccacgatggtctcaatctcctgaccttgtgatccgcctgcctcggcctcccaaagttgcaagatccgtatcttgaaagccttcacccaccgttttttttttttttttttttttgccttattttcaagctctttcatcatttccttgatgggctctgttgttaagttctgtgtgcaacatctggacacagttttctccagctggaagttattgtttcaggcttgatggctttcatggctttttctgtaacagcaatggcatcttctatggcgtgattcttcggactgtcatgatattctctccactggggttcttttccatagcactgacaatcatttttatagaatattgtgtttaatggtccttatggcaccctgatctagaggctgagttagagatgtgtttaggggcaattagaccacttcaacacttgcagtgttaaactcatagggttctgggtggccaggggcattgtccaacataagaactttaaaaggcagtcacttactggcaaggtacttcttgattttagaaataaagcatgggtggggccaggcgtggtggctcacgcctgtaatcccagcaccttaggaggctgaggtgtgtggatcatgaggtcaggagttcgagaccagcctggccaacatagtgaaaacccgtctctactaaaaatacacaaatgagccaggcatggtggcaggtgcctgtagtcccagctacttgagagtctgagtcaggagaagcactcgaacctgggagttggaggttgcagtgagctgtctgggcaacccagcgagactctgtctcaaaaaaaaaaaaaaaaaaaaaaaaggcatgggtggattcaatccagaaaaagagtttttgtttttcaggctttcttgttctactatcagaagactagcagggctggtgtttatcttttttccttcaaggtccagaggttagcagctctttatataagggtagttctgatcttaatcatgactgcatttacacaaaacagtggagttagcttatcccttcctgccttaaatctcggtgcttgctcctgttccttactaataaatgtactttgtggcatctttttccataataggattctttcatcggcaataaaaacctgttcaggcagataccttttgtcctctatgattttcttgatggtgtccaagaacttgtgtattgcctcttggtcagcaaaagctgttatcttgatattttttaagctaaaactctttctaaaattatcaaaccatcctttcctagcgttaaattctccagctttagatcctttaccctccttttgctttaagttgtcatataatgacttcatctaaaaaataatattagagtctttagttagagctttcttacagcaaccctgtacccacataagagctgcattttcattatgagatttaaaaggtattctgcaaaagtacctggttttcacacctagtggcattgctgcaatgacagcttcacaaatttccttttcttattttacaactgtcctcatggtggattcattgatcttgaaatgatgggtaaccacagctacttaatctatggtccatatcaagccattcaagtttttcttgtaatatcttaacttctctctacttttcttgagagcatttccagcatcactagtggtactccatgtggatcccatgatgttattcagggtttgctgtatcacactaaccatgatggaaaatacatgagaacctttaaacaccagttttgttatctttttggctttttgttttattagagacagagtcttactctgtcacccagactggagtgcaatggtgcagtcatagctcactgcagcctcaaacacctgggcttaagggatcctcctgccttagcctcccaaaagagattagttttttttttgttttgttttgttttgttgttttttgagatggagtcttgctctgtcacccaggctggagtgcagtgacgcaatcttggttcactgcaagctccacctcccgggttcacgccattctcctgcgtcagcctctggagtagctgggattgcaggcgcctgccaccatgcctaactaatttttttttttttttttgtatttttagtagagacgaggtttcactgtgttagccaggatggcctcgaaaagagattagtttttaactgagatatgctgtttattggagagcggaactgctcctgcagagatgattaagttggcagggtgtttgaagtacatacttgcaacacttgagctctgggcaatagcaacaggaagtagctacaaaactattatagtagtgcagtaggtactacagctagttttatgcagttatgatttaatactatacatttgttaacatttctctgggctgtgaatgtcaccttgtatgccttgtaagtgtgtaagtttttataaattttaacttcttatagtagatttgtattttatagtagtaaatgataaaatatactacctacatttttttgtttgtttgtttgttttgagatgggtcttactatgttgctcaggttagtctctcgaactactgggctcaattgatcctctcgcctctgcctccccagtagctgggattacaaatgcacactactgtggcatgcatccacatatattttatgtattcatgacatgcctaacttttcttattttccgtatttctaggctacacggttttgtctaagtttttcaaattgttgcaaatttccaaaaactttacccatatattatattggaaaaaattggcatctaagtggacctgtagttcaaacccatgttgttggtcagctgaatatatttcacaatatcacagatgtatatatctttgccaaaattatatttccataattaagtgatgaataacaaagtgatttatccctggcaagagatgaataaatatttgaatactgttttataaaaaacaaatataaatttggggctccatggaaaatcttcccaaggtatatttttggacttttcctttgccattctcttcttatttctcaatatcatttctcacaaatgtagccatttgcatctacttctatttctgattcttactcttaccgaattatccatgttcttctcccatttttttcaccagtagtcctatctatacacttcaatgtcatagtcctgtgtccctttcactgcgaaactccctatcacacagatcccacgattgccctcctctacttcccagcacttggtttctgcttcatcagtaacacattttttttaaagctagatgtatttattttgatctccctcacaagtctatgagttctgttgtctttgtttctttagtttccaggaaagagctttattcagagtagttgttcattaactaggcaaaggaatatcatttgaggatgccaaacctgggcttatccaggagtaaacttttgtccttattgtggtaccttatcctaattgtagtaacattaaaagttagagaggaaaagccattggtctcagtatttcatattatagttttaatctcagtcttgttgctgctattccatttggccagtagtaaaaaaaaatccttacctttccaaatacagaaaaatattaaaggtagggtcactatctgtttctggcagacatgctctgtacttaattgtcatttttggtctttgtttgtaaaccgggggaaggtaaggacatagccatatgccttgtggctctttcatgactatgtatatatgagtcaaaatattatttttcactgtcttaacatttttaacaatgaaagtaaatgcttgtgataaaaattcaaacaataagggctgggtgcagtggctcacgcctgtaatcccagcactttgggaggccaaggtaggtggattgcgaggtcaggagttcgagaccagcctgacctacatggtgaaaccctgtctctactaaaagtacaaaaattagccgggcgtggtggcacacacctgtaatcccagctacgcaggaggctgaggcaggagaatcacttgaacccgggaggtggaggttgcagtgagctgagatcacgccactgtactccagcctaggctggtgacagagtgagactgtctgaaaaaaataaataaaaatttaaaagttcaaacagtataaagatatacagagtaaaaagtagaagtccttcatactcttaacgttcttgcttcacagagatcttcaatacttcatacttgatttgagtattttctttcttttttctatacactttcatttagatgtagatctgaatttttagaaacataactgtatgtatagtgactttttttttttttgagacggaatttcgctcttgttgcccaggctagagtgcaatggcacgatctcagctcactgcaacctctgcctcccgggttcaagccattctcctgcctcagcctcccaagtagctgggattacaggcatctgccaccatgcccggctaattttttgtatttttagtagagttggggtttcaccatattggccaggttggtctcaaactcctgaccttaggtgatcggtccaccttggcctcccaaagtgcctgcattataggcgtgaactaccacgcccagcctgaattttttttttttcacttaacaatgtgtcttggagaaccctgttagtatattttgatgtgtcccatttttaactgctgtattcatactctggacagatgtcttagtcaaacagaaaaatctaattcatgtaggcagcaaagcacttcatgacatcaaggaataccttctctggtgctgagggatattaatgcctgacatattgggatagttagcacagaatcttaccattgacttatttgtgtgaataagtcttgtttctttgttgttgttgttgtttgtgttttttttaagacagggtcttactctttgacccacactggagggctgtggcacagttttagatcactgcaatcttgaattcttgggttcaagcaatcatcccacctcagcctcctaagtagctgggatcacaggtgcatgccaccattcctggctgattttttagatttttttgtagagacgaggtctggctatgttgctcaggctagtctcaagctcctggccttaagcagtcctcccacctcagcctcccagtgtgctgggattatatagatgtgaaccatgtcatctgtcctgtcctgtcctgttctgtttttaaaatgtttgtctcaggccaggtgcagtgtctcacgcctgtaatcccaaaactttgggaggccgaggtgggtggatcacaaggttaggagatcgagaccatggtgaaaccccatctctactaaaatacaaaaaattagtcaggcgtggtggcgtgtgcctgtagtcccagctacttgggaggctgaggcaggggaatggcttgaacctgggaggcggaggttgcagtgagctgagattgcaccactgcactccagcctggctacagagcaagactctgtctgaaaataaaataaaataaaatgtttgtctctttcagggcaaaaaaacattttctttcaattgcctggcacatagtagacacttaatacatttgtcaaattaatgaatgatcaaaagactgttgaaagttaagttctggactaaataatacaaagtccttgtaatgaatacaaagtctcaatctacgatgatatctataatatgtctcagggtatttgttaatgagttaattattcttcttggtcaaggagatattgaaatattgaagtttaatttttttttctgtttttgtttagtaaaccttcattgctgaattaccattatctttggaaacttcatttgctaaacataagatgaattattcttttatttccagcatccagttttggatgaaccaatagcagaagctgtctgtattatagctgacatggataaatggactgttcaagtggccagtagccagagacgagtgacagataataaattgggaaaggaagtattggtttccagtcttgtttccaatctgcttcattccacacttcagctttataagcataacttgtctccaaattttgtaagtatgtgtaacactgcttgcattactttaagcactgcttaaagctttcatcattgttttttctgaaaaaaagctgttagggactgaatgtttgtgtcattacccgaactcatatattgaagccctaattcccagtgtgacagtatttggagataggatctttgggaggtatctaaggtaagattagatcttgagggtggggtgctctgatggtattagtggcctaagaagatgaggaagagaaagattgttctgtctccaccatgtgaggacacagtgagaaaacagctgtctgccagcaggaagagagcccttaccagaacccaaccatgcttgcaccttggtcttggatttgtagcttccagaactgtgagaaaataaatatctggggttttttgtttgtttgagacagtgtcttaatcccatcacctgggttggagcacagtggtgcagtcttggctcactgcagcctcaacttcttgggctcaggtgatcctcctgccttagcctgctgagtaggaggaactacaggcacgtgctaccacacctgactaatattttgtatttttttagtagagatggcattttgccccattgcccagactggtctcagacttctgggctcaagtgttcctcctgccccagcctcccaaagtgctgagattacaggcatgagccaccattcccagctatatatctgttttttttttttaatccatccagtctatgatactttgttatggcagcccaagctaagacagaaggggttgtgtacatgtctgtatgttctgatttcagcagccagaatttttgatcatgtgtagtatagtcatgcaacatctcccagctttgtgtagaatgccagtacattctggatcctcattgtcatgtcaggacttttattgatctctttataatactggtaacctctttctaaagatcccatttccaactttcaaggttctttctttcacttattaggagaactataacataccatagttaaaaagctctgtagttcaagatgataaaggatatctatgacaaacccatagccaacatcacactaagtggtggaagactgaaagtatttctctaagattaggaaaaagacaataagacccactttccctacttctgttcaacatgctactgagagttttagccagagcaatcaggcaagaaaaatacaaaagacttcaagattggaaaagaggaaataaaattatctctgtttgcagatgacatgatcttctcgtacatagaaaacataaagatcccacagaaaactggtagagctaataagcaaattaagcagatttgcataatacaaaacccataaaaataagttgcatttctatatacttattcgaacaatgaacactctgaaaagaaaattaagaaaacaattccacttacaatagcaccaaaaagaataaattacttaggaacaaatttagggagacaaaagactcccttgtacactataaggtataaaacattattgatagaaattaaggacatatataaatgaaagcacttcccatgctcatggattgaaagacttaatattattaggatatcattactactcaaagttatctacagattgaatgtaatccctatcaaaatccaattgatattttttgcagaaatagaaaaacccatcttaaaatacattaagaatctcaagagaccccaaagagataaaacaatcttgaaaaacaacagtgttggtagatttcacatttcttgatttcaaaacttattacaaagctacagtaatcaaaacattgtgctactggcataaggacaggtatatagaccaatggaatagaatggagatcctaaaagttaaccctcacatataagtttagttgattttcaacaaaagtgccaagaccattcaacagggaaaggagtcttttcaacaaaagatgctgggaaaactggatagccacatacaaaagaattatgccacgtacagaaatgaactccaaatggatcaaagatttaagagctaaaactataaaacttacaagaaaacctaggggataatctttgtgacattggatatgacagtgacttcttgaatttgaaaccaaaagcataggtaacaaaagtaaaaaaatagataaattggatttcatcaaattaaaaacttttgtttattagctatcaacagagtgaaaagacaacctataaaatagaaaatatttgcaaatcatatatctcaaaagggattgatactcagaatatataaataactcctacaactcaacaggaaaaaaataattgaattaaaaaatggcaaaggacttgaatagacgttttgccaaagaaaatatacaaatggccaataagcacatgaaaatatgctcaacatcattagtcattagggaaatgctaataaaaccacagtgagctgccattcaatacctgtaaggatgactatgataaaaagaatccacaaaaaatagtaagtattgaccaagatgtggtgaccttggaaccctcatgcattgttgatggtaatgtaaaatggtgctggagccgtggaaaagtttggctgttcctcaaaaagtttaacattgtatattaccatatgatctattaattccacttctgcgtttatactcaaaacaattaaaagcagggattcaggcagtatatactcttgttcatagaaacattattctcaatcgccaaacgttagaaataacccaagcatccatcagcaaatgaatggataaacaaaatgtggtataatatatacaatgcaatatttattcagccatgaaaaggactgaaattctaatacatgctacaacatggatgaacctcataagcattatgctaagtgaaataaactagacacaaaaggacaaatattgtatgattccacttatatgaggtaccacaaataggcagattcatagagactgaatctaaaatagtggttaccaggggctgcgggtaagaagagaataaggagttattgtttaatgagtacagagtttttgtttgagatgatgagcacagagtttttgagatgataaaatgttctggaaatggatggtggtgatggttgcacaacatcgaatgctcttaggactatataattatatactgtaaagtggtcaatatagtaaattatattacatattttatatctacatatattctgcagttaaaattttcttatggcattatcagcctaaagcattgtgaaaaaacatacactataaaaccacaaccatttggttgtgttttacaataataaagtagatttttattaggagcttttaataactgattttcattggaaaggaacactctgtatgaatttaatgtttagcacctgaaacttctgttttttcctcaaacatgtttagcatcaattcacatgataaatcacctattttagtaaattgagcaagttaattgacattaaacaaaatgtatgtgtttcaggtttttttttttttgtaacttttgtcacccaggctgaattgcagtagtaatcatggctcaatgcaccctcaaaacccctgggctcaagtagctaagactacaggcacgtgccaccatgctcggctaattctttttttttttttttttttttaatttttgtagagacagagtctcactgtgttgcccaggctgatctcgaactcctggcctcagatgatcctcctgcctccacctcccagaatgttgcgattacaagtatgagccaccatgcccagatgtgttttaattttcagtctttcagcttagaaattggggaaccacatagcattctttgtgaacttttgcaaactgttttttattctccacaggagaatacatcctttcctatgtaaatacatttgaaaagtattaatttataaaaattttatatttatcaaatttgaaataaaaacatagtgaaaaaagttttggaaatggatagtagtgacggttgcacaacattctgaatgtacttagtgccactgaagtatatttaaaaatggttaaaaagggctggacatggtggctcacacttgtaatcccagaactttggaggctgaggtgggtggatcacctgaggtcaggagtttgagaccagcctggccaacgtggtgaaactccatctctattaaaaatagaaaagaaattagccgggtgtggtgcgcatggctgtagtcccagctactcaggagactgaggcaggagaattgcttgaacccgggaggcggaagttgcagtgagctgtggtcgcgctttgcactccagcctggttaacagagcaagactccatctcaaaaacaaaaaacaaacaaaaaatggttaaaagggcaaattgtatgtgtatttttgcacagttaaaaaaaaaaaaaaagacgctgtagaagctaatctttgatatgagccagaaaaagtttcacttctctttttagctaaaactacatactttaaaaatgtgctccaaattttagttcatattgaaataaacaaacagaattgtcaaaaacattatgttttggagtttgccatgactgagagttgcaaactgttttctgacctggttcttggttcctccctaactgcagtgtgtaatgcatcttgaagaccggttgcaggagctatacttcaaaagtaaaatgctgtctgaatacctgagggggcagatgcgtgttcatgtcaaggagctgggagtggttctggggtatgttaatggttccttttttggctttgctttcattgccctgtcatcaggcaaggaattttcctcagaattgccctttttccttttacgtgtcttctcctattagaagctggaggctgttatcatttaggttgccctgtaccatgtaatagcaggttccctgtcatccactaatctgaaaggcattatcccttgtgccattacatacagtaggttgagaatataatcacagtgaattaaaatctgaatttttgtctcagaaacataagtacatactcatttattaaatatgttgcaaactcattattccaagtatctgccctgccttccacatgagctggttgaggtaacagaagtctgtagatggtaatacgttatccatatattactccttcccccccattaactatatattatatctgtctactctgcattattctctggcagaaaacagttatcaaaaatgcttactgaaggaggaatgggaagttggtagggggggcataatatagccctatttcattatgttctgtggtcacttttcttgtgttctctggccactttaggtgggttcatatgaattatttcctgaaatgccattaaagaaagcaaaacaagctagaacttttatctaatttggcttttatgatgggaaaagaaaccaatatcactgagaacctactgtatgtcaaaccacatgaaaattttttactagtgttatttcttcattcttactatcatcctgcagtgtgtaggcagtgttatccaggttggaaacagatgattctgaagttaacatgccagatgtcacacactggtaggactaattagggatttgaatgactctatatcttttttactttagaccctatttatattctgtagtaccacactgttggtccagacttgatgattttgacttgagttatacagagagaattgttctccagtatttggaaaatcagtaacaggatataaccttgtttttctggggagtgagctgtgtgtttaatgcctttatgtaaaaatatttaagacaagttttaaaaagtaacataaatgtaaccaaaattcacagtgcattttggcatacaatgaaaagtaagtcattgtcttcttcccccaacttccaacccctactcaaacactgttaacagattgttttgtagaatttttaaatgaatattatttaaaaatctaagttgagttatactcttgtgtccttgtacaacttgccttttactatatcttgaatgttcatataagcacagaataatctcattcttcctaatggctgtctagcattcccttatatgttggaatttagattatttttagttttttgctactataaaccagtgccagactgaatataagtctctgacatttgtaggataaattccttgaaatagaatttttggttaaagggcctgtattgatagatagtttgacagattatactgaatactctccagaaagtttcaaaatgaattcccacaaacagtaagaggcactcttctcagtactggctattaccagatttgatctttgctaggctactatctaaaaaatggtatctgattttattcacatttctctaaccatgagggagtctgattaatattttctatgttggttggccatttttcttttcctataaatttgtggtaggatgtattttgaagtagctcccattacttccaatacatcttattatagaaacatttgaatccaaaacaatctgggtacacattattattctttgttttttttttttttttgagacagggtcttgctctgttgccctgctgttggtacatagctgacttcagcctcaacctcccaggctcaagagatctttctgcctcagcttccagagtagctggtaccacgggcacacaccaccatgcccagctagtttttaaaatttttttgtggagacagggtctcattatcttgcttaggttggtcttcaactcctgggcttaagcgatcctcccaactaggcctcccaaagtgttgggattacaggcacgagtcacctcacccagctattattacactagattgcagttgttagtcattgtgccatgccccagttcatgttccatcagcatgtcattgagacacttttctacgtttatgatgttgttactcgtatctgtagttctgtgttttatttactgagaatttttcctttcggccagagtggcctagctccttaaccgttgaggtatagtgaccttacagttggtggtcattgcctgtagagttcatgtcctcagtacagaaaatcaaaactgacatttttttcccctttatttcaggattgaatccagtgatcttccacttctggctgctgtagcaagcactcactctccatatgttgcacaaatactcctttaatatacctaaaaattgttagaaattggtgggaaaataggtagaaaccaaggaagcagacacaacatgcatttatggagattctttttcccttttagacttccatctgaatgagtcagtcaccagggtattctgcatagcattgtatattctgtgtatgtcagatggctttttctttttgactggacttttgggtggtggtagatttttaaacaaatgaaattaaagcaacaataattttgaagcatttgaaaaagccaaagtgtacggtagaaatttctacaaaatgaatattatcaagagtttcatgtgatcactgcagtgttgtcacagctcataaatagcaacagtgtctcatgatttaatggctcagaaatagttattcattagtttttaatttttaatttctaaggtacagagatctataaaaccttgattatttgttagttttgcaattcaaaacagctaatgtctggttatttctcaaagtaagtattttaaacagcctgttaattataagaaactcagaataatgagtgtaaatgtgttatgttatccacccaagtgtacatatgtacctatttttttttaaaaagcagaaatagaaatacaagactggtaaacatgcctttaaaaatatatatattttcaactagtattgtctataatgctgaaatattacttattggtgatttttctgtttcacacactctaaaatataagtaaagccaaccttttttttaaggctgagattcccaaaatgagaatactactttataccatttgtttataagtatgaactgttcttataaatattaatatttacatattcactaatttaacataaatgaaaattaggattaaaaattgcaccaaagcatcggcaaaaacaatactatattctttaaaagtgctcaggtagccaaggcccttgcttttggtatcaaccctcatgaacccataggagctgaatatttgtttcactgcttaataatcctcaatttacactattcataactcttaaaattattctctttttttctaagagcccctcccttccaaaagtgtatttttttcaaagattttcacttctcaattgttgcctttgtacatactatagagtgttgcttgtaagaaaggctaatatggaaccaaactcttgtaagtaatgtaaatagaaaggtgggtggataaagttttcaatactttctactacctcagtttacttgagtactacattatagtttattctttgcttatctggtctaagagacttttaatgctagtagtaaagttggtttctgctttcattgactattttcatcataatttcatcattgattaaaaaaagaaaaccacttgtttattcagttattaaatatatttactatataacacatccattcttgctgtttaaattttcaatagttaatggaaagttgtctttgaccttgaatttacagcattgggtcacattttgccttgctgtgtatgtattcaagagacttccaactagacaaagaaaaaattgttgttttaatggaatgtaaacctgaaattggtgtgtctgcaatctgtttggcccatgaccttttacctagtcccagttattacctgagtctcccatggatgacttgctgccaaggagtgtttgtggatatattttctttggcttaattttcttattctgtgcattaacaaaattatccagttgtctgattttggaattctatgagtcaatctttttggcagaattcagaatattaaaaagttcatacatttgcgggccattgtacctttttttttttttttttttttttgacggagtttcactcttgttacccaggctggagtgcaatggtgcgatctcagctcactgcaacctccgcctcccagttcaagtgattctcctgcctcagcccccaagtagctgggattacaagtgtgcgccaccacacccagctaattttttatttttagtagagatgagatttcaccatgtgttggtcaggctggtcttgaactcctgaactcaagtgatccacctgcctcgacctcccaaagtactgggattacaggcgtgagccactgtgcccagccttgtacttttttttttttttattgtagctctgtatagcacttggataatgtctgggtgtctccttaaccatcaaactgttctttatttaaaatgtttaattaccgtttagaaattctagtcctcaataagtgggtggctcatgctattgttgttcctaaagctaagctttgctgggaaggaaatgacctatagtttcttaaagaatcattaatccttataggattcctgagttactgttttgttcctccccactgcttcccattcctgagttttgtaattcctaatccttctataatttctattaccttcaccatagtcattctttccttacgcaaagcccaaggaatgagctgctgctactttaaagtgtggtcattatgatgaatgtgaaaagagttttggcttgttctaaataatttttacaagttatggtacagacagttgttacatatcaaaaaaaacctgtttattgaaacaggaaataaaaaagggatcttttacattatagaattaaaactaattttttcttgtatataaactaattggtttgattttaaatatttctggcttttattaatatgtcttaattttgagtttgaaaatgttaagtgcaataaaaacatactagtacagattttgttttgttccaattggcatactctggggatgatcacttaaaaaaacagattttacataatgcctacttctggtagatgtcttatgagattgttctgctttttctaagttacttagatgttggatatgtacatagctgtttcttgttctgtatacatttctcaaatgtacacttgtattataataacctcccagttctaggggatatttgtgcaataaatacacatgtcaacttgatggatggtgttggtctttctttcatatattaaggtatacgtaacatggactgatgtctgtccagacatcagatgacagaagttatggactgatataacttctgtcaaacttagaagtttgacacttctaaggatgtgacctttcctcattggtatttccatattggtaatttaatagaatctacttcatgaggtggttgtgagaatcaagtgaaataatgaatgttaaggatttagctcagtactggcatactccaagtgctaaataatttttggctgctacttttaccagataatctgtccagccttcctcttgtggccccccacctattgttttgcgaatttttagcgtatgttcttatgaataaaaacatagtaacagaaaatataagagtatcttcttacagcgagcaacaaattgaaaatttctttaaatgcttttatgaaagcaaagtgaacccaacaatctaaaaacctagaagttatataatgttaagaaaattgtattcaatacaggctgggtgcggtggctcacacctgtaatcccagcactttgggaggctgaggtgggcagatcacctgaggtcaggagttcgagaccagcctgacaaacctggtgaaaccccctctctactaaaaatacaaaaattagccgggtgtggtggcaggcacctgtaatcccagctactccagtggctgaggcaggagagttgcttctctcctgcctcagcctctagaggttgcggtgagctgagatcctgccactgcactccagcctgggcaacaagagcaaaactctatctcaaataaaaaagaacattgtattcaatacaaattactatactttacaaaaaattggctgattagtttgggttttaatcctctttgttcactgatttgcaagtgactgagcaagtctattgttttcatctgtattgtagggaaatcagctttgtgcctgctctatagcagtgattcatcagtgagtaggcttattggtaagctgtcttgctcaggctaggttgatctgggcagagttagtcctgggggcgggactagaccaggggctttttgaggtacctgttttcatataatactacatattatcactcttacatttaaccaaagagagtaagtgaactgtttcaaagcagagaagtctcaagtatttgggaaacagctgtcagctattttagaggtttaaaattggtaacgtttatgagaagatttttgctagtgagaaaaggagatacagagactttaatgtgattatctgaagtcacagtctttcctgtgtgttcatcttgtctctcagaccagaatgttttctcaactactatgtggtgacagctgtattgtaaagatatccgggatttcttcatttgtctttgccaatatgcaaggtggggtagggtggcaagtaggaccaaacctaaactgaaggtgcaaggtggggctggaaaattgtagctgtgagtgggaactgcttaggcagatagaaatgggggggcacaggggagtgtagtgctccctgtttttgttccatcctgcagactgggtttgccctgtttgctctaaatttaagattagttgagacttcccctccccgccccccccccaaaaatacaagcagtccaaaacagaatatgttcccacccattatttatcgggagaactttagtgtccttttggtcttaaagcatgtgctcagttaccctctctcttccaatagtcaggtgactagttcttcttatctttcttttaacactaactttgtttctggtgaacctgaatctagactgatcccttcatcagattgcagacacctctgtctgggttaacgcagtcttcttagacatcccacaaatacacctgtatttactctatggagagtattaagttaaagaggcttgagcttccttccttttcaagtggctgtcttaataacgacagtccttacatttacctcagtgcacaaattcaaattaatgataaaggcagtattgctttcctacattgtctcaaggggaaggacgaaactcttgataaatgtgttaagtacagggaaggtatttccgtaagaatcttgtgatatcattcttgggcatatttggtctagcactcacaagtcaatgtccttctttagtgtggtacaatggctggggttaaagatggatcagactagtttagaaccacagttattatagtttaaagtggttctcaaacttggttgcatattggaagcacctggggtagcttttgaaaaatatgagctcctatactcccaccaccagagattctgattcaatgataacaactgaccttctggatttgagtcagtaaaagctcttatttgtccatagtagtgactcaatctctagcatactccaaatctcagttccttacttcatttcaggtactgttaaaacctgagctttttaccccatttttgttggtttgcagttattctggaaagatggacatatgattatgtctgtttattgagcattcagttttgtaatgcaacagctatgtaaccagagatgatctttgtcactggagagcaatcaagtacctctgtttaaaaaaaatttttttttcactcttgagcagcttcatgatattcaagtacctctcttaatagcaaaatgccctcataataagttagtccttaattgcacttggtcattcagcaaatatttattcaacacctatgatgtgctagggataggtttggatactagggatatgccaataatacattatttctgttttcatagagtttacatattttccttttggtggaggggatagaccaaaaaaaattaaatacatatacatgttactcatatgtaatgtgctgtcaggtagtagtaagtataacaaaaataaatagttaagcaaattaaaaagtccttattttcccacaatttaataaattacttgcattgtttctttcagatacaagttaatgctggtgaatcctgtcctggaggttgccttttgtctgaaaatagctattagaactttactgtctctcctcacttttctctgtatataacaatataatacaagatagtaaaggacaagatagattttgaaaatgtatacttaaatttagttatggatagtcaccatgtatattaatgtaatttttactgttgctgcctaatgagaaagcctaattatttttgcatactttctcttgtgaaatatatacagaaaacagagtaaatatatactcatataaccatcactaaggccaataagtagatcattttcagcatcccagaagccccctcctccatgtgccctatcctgatcataattctctaccttctcacttttgtaactaccaacctgacttcatttccttgctttctctttattattttaccctgtatttgcatccctaaaagacctaattttgcttgtgtttaaactctgtctgtgtaattatactctgtattttgttttgctttttctctctcaacattatgttggagaatcatcactatgtgctatggagctatgtgccattgtggatgaatattttacaatttatcccttctagtattgatggatatttgggttatttccagtttttggcttctatgaataaggaacatttttgtccatcttttctattaatagggcaggggtccccagtccccagtccccagtccccaggccggtactggttcatggcctgttaggaagcagccgcacagcaggaggtaagcaagcataactgcctgagctccgcctgtcagatcagcaggggcattagattctctaggaacaggaacactatcatgaactgcacatgtgagggctctaggctgcatgctccttatgagaatctaataatgcctgatgatgtgagttggaacagttccatactgaaaccctccccctaacccccatagagaatttgtctttcacaaaaccagtccctggtgccataaaacgttggggactgctgctatagggcatatatcaaagaaaggacttgctgtcataaggtgtgttatgtttcaactttattacttttttttttttttttttgccaaaagtgacttcccaacttgcacttaaccagcactttgagttcctcttgctccacatcttcacaaatacttaaatgtgtttctgaattgttataagtgaaaaaaaactgtattaaaaaaatctattcaattattcaaagttgaatttctactttagaggaatcacttcccaggccgggagcgggggctcacgcctataatcccagcactttgggaggccaaattgagtggatcacttgaggtcaggagttcaagaccagcctggccaatatggtgaaaccccatttctactaaaaatacaaaaattagccgggcgtggtggcgggcgcctgtaatcccagctactcaggaggctgagacaggagaatcccttgaactcccgagtagttcaagggacattgcagtgagccgaggtcgcgccattgctctccagcctgggcaacaagagaaaaactccgtctcaaaaaaaaaaaaaaaaaaaaaatcacttcctagaggcaaaataatggaaataataaggagtgctcggattgtgcagcatactaagtgcttcatgtgaattttctcatactaagtgcttcatactaagtgcttaagtgcttcacgtgagttttctcacgtaatcttactaagtgcttcatgtgacatactaagtgcttcatgtgaattttctcacttaatcttaagaaaattctgaaacaataggtcctttactatattcccatttaacataaggaaaatgaaggcaacatactaagtgcttcatgtgaattttctcgcgtaatcttaagaaaattctgaagcaataggtcctttactatattcccatttaacataaggaaaatgaagttcagagatgttaaataacttcaagtcacttaactagaagaggtctaatattagagacacaaattctaggtctgtttgcccctaaagttcaagttcatggtgatcatgctttatagttctttctccctctttcaaaatattgatgtgactctgaaaattgatccttgaagaatggaagggttaacttttgtttgtgatcctgggcagatctttgagaggttatatttgtacaaaaaatgaggaaaacggatcgtctgcaacatcctgtgattttttccacaattactttatttctacaatggctatgccacacttcgctggtaaagtttttgatctatacctgaaaaagagaaatgctaatagtatgttgtaaactcccagtttgggcaagccccaggaccaacagaaaacagtccttaagtcattgccggtcccagaaacggtgttgtagcctgaactctcattgttttcaaatataattttaactcttattacgtcattaaaattactgtgaagcagtcattaattggaaagcatgtcataatcataaatcaccttgttatttagtgaactatgctaactgctgtgagaaataccaaggtgtacctagatgtagttacagccatcaaggagcttaaaattcagtggaaaggtggtgtcgccaaagttagttacctatgaacttatgagaaagggtaaggagtatcctagaacgatggattctggaattgtcagtgagcttattgttgaaacggcctcagcagctctctggctgctcctaagggtggtctgtttttcttaccaagggagcagtgaaacaaaactggctttattcggtctgttgggaagcagactagaatgtaaaaagtattgcaaaagttgccactcgagtcccaaccctaaacgcagttgcctgagggagggctgccccgggcatttagttacaagaacgcagtctaaatctagttttttgactcaaaggtaatcgtgagctggccgcggcaccggctgcctatcctggccgtgaatgtttgctttctctgccctggtctcaggacgtccgtttcgaatagatcaagcacttctctgtcggcagctttcacaagagatctcgttttatttaaagagatatgaggtgtgcgtggaattccttctttgccgaatggcggcttctacttccgcatattcaaagtcggcagtagaagttgcagaggagagcgcaaagccggacttggccacaccctgggcttccggatttgggcacaacagttctctccagtcagaacgcctccccacggttctgccccaaaatgctatttttgctcaggtcctcagcgcgtttccggtgtctccaacggatggagaagacggaaccacaacgccaaggcagaccccgtgactgatttaggtgaggtctcgcgaggtgtctttaaatctcacgacgacagcaggaaacgacttactcgcaccgccccaattttaacgtcacagtggagttactcccttgggcgtttcttagcgtgcgcgtgcgtgctgcgcatgcgcacttactctcccccgcccccgcgcagacttgtctccggccagtcgcgcgtgggtagaggccttaggcgggcgttgcgaagggttgtttgctagagttcggaccttgttacggcgcgaagttccctccttggggcgggggaaaggtaccgcacccgctacctagtgtgaatgaactgtggcgtgggctgctaagggcaggctgcggagtacccgggccgtggccatgaactcacccgtggaccctggcgctaggcaggcgttgaggaagaagccacccgagcggactcccgaggtgaggctggttgacctttatgtgcgtctcacagtccagtagacagcatcctcctgtctgtccgaaatccgcggcgactgccctcttgccagagtctcgcacctgctactgggaatctgttcgcttgagtctcttccctgacccaggcccttgtcgccagcagggtgccgaccgcccttcctgcctgtgatgcggtcttaacccgcgtacccgtccttgccgggggcttctgagtgtcgttaagaaagcaccattactaagtcgtattttctgagttgggtaatatgagtttcgcagttagatgcccattcgtttaagtagactatgaaaaacgagatggaaattgtaagggaagtatctcagccatgtaatttagaaatagtttttctttaaaggtctctgaaatattgtacagttgcctaaaaaaaagataaagttttcaaagttagtttaaaagtttacatccagtcaaatggtgaattctgtagtagatgatgcatgtttaaagaacaccactgtaggtactttttcagactgtcactgggaaattttacagtattttgtgcttggatccaaaatttgctgtgtcgagttaacagttatggcatcagcttaaaagatttttcattcgaccttcatgaaggctagttttcaggcatataactaaaacctgttagctttgcttatcccggtagaatgctaaggttttggggaaggttttccttgatttggaggtttctataacaagtgggacatattttctaaacaaaacactaaacagtgtgagtggattattggattgttttgtttaaagttgcagtaaatgaaatgaaatgctttggttaattcttcactttggagtttttcagatatgtagtgttttgcatactgagtctcagtaacgttgggctgaccttttgggtcgtgacaattattcaggtcacaacggaagccatgataggtcaaattatgttattgaagatcctgatgtttgcataggaacaacacaaattctaccactttccagagttctctttttgagatatacatttataattcgatgagtgtttgtttccttatgatgattcttgaagtcaatgtgagctgatttatgaatttcagtaggcgaattatcttacagcctttatagcattggaaagtattatacaaggcttacgatgtgtattgcaggtttcaatttaatttaatttaatgttattttattttttatttgaaacagtctcactctgtcacccaggctggagtgcaatggcgcgatattggctcactacaacctttacctcccgggttcaagcgatttttctgcctcagcctccggagtagctgggattacaggcaggcgccaccacgcccggctaattttttgtatttttagtagagacggggttgcaccatattgcccagggtggtctcaaactcatgacctcaagtgatctgcccgcgttggcctcccaaagtgctggaattacaggtgtgagccaagttgcccggctgcttttaattttcaacattacttgtgctactaaattcacattttaatggaaaaatcctactgctctttaacagcagaattatttattttgaaattgcctattttattttttttgagacaaagtctccctctatagcccaggctggagtgcagtggcacgatctctgctcactgcaacctccgcctcctgggtcccggttcaagtagttctgcctcaccctcccgagtagctgagattacaggcacacgccactatgcccagctaatttttgtatttttagtagagacgggatttcaccatgttggccaggcttgtcttgaactcctgacatcatgatccgctcgcctcggcctcccaaagtgctgggattataggtgtgagccccgcgcctggctgaaattgcctatttttgagccttaggaaattttctaaactgttcataaagttatgttggccactgtgtgctgtgttaagtactttattgtgcttaattggaacagaagcattgttcaagggaatgctaaacagctgcccacagtacacagaatgtagccctgacatctagcagcataagaggttaactgatgcattggtagtgcttttgaatgagtgtagaatttgtttggggtaaagaagtatgaagaaggaaatctgaatcctagtgatgatttgtttgtgataaataatttgacaaaattctcccaagttcatttctgttttcagaaggtccttttactggactcccaagggtctattatgaatatattagctctatagttgcttattgggagtctagcagctgaaggcactagtctgtgcactatgttgtatccataaacaaagcaggtctgccctagtaagacttacattctgatagcatgaagagtggggaaggcagataatgaatatactaaaaggtaagttacataatatgtagcttataattgctagaaaagaaaagagcagagtaagagggattgaaagcaaggggcaagggctgggttgcagtttaaataaggtggttcgtttaacttggttgagaagatgatttttgatcaaagacttgatgcatgtgatggcattaactataggggtatatggagaaagtgctttcccagcaaagggagcaatcgttgcaaaggccctatgttgagagcatgttttgatgcattccagaaatagcaagcagctttgtgtgactggagaagggtgaacaggtgtgagagtagtaagagatgaaggaggagtggagataatgatgcatagcatagggcacatcctatttgacttttcagtgagggggagcactgaaagattttgaagcagaggagtgatattgacctacttaacctttttttttttttttttttttgagacagagtcttgctctgtcacccaggctggagtgcagtggtgcagtctgggctcactgcaatctctgccacctgagatcaagcgattctcctgcctcagcctcctgagtagctgggactacaggtgtgtgccaacacgcccggctaattttttgtgtttttagtagagatggggtttcaccgtgttagccaggatggcctcaatctcttgtcctcgtgatctgcccgccttggcctcccaaagtgctgggattacaggcgtgagccaccacgcctggcctacctttttgtttttaaagagggtctcactatattgcccagtctggtcactaatttctgggctcaacagattctcctgcttcaacctcccaagtagctggaactacaggcatgtgccactacacctgactaccttactgggtagtctcctggctgctgtgttgagaatagactgtaggtgtttaagggcaaaagcaggaggttaacggctgttattgcataaaatcaggttagagatgatggtcactctgactaaagtgatagtgatagtaatggaagtggtgagaagtggttaagttttagaaatattttgtagggttagccaacaggatttgctaatagatcagatgtggaccttgaggaaaagagaagaatcaagcatgacttcaaggtttttggcctaaataactggagtgttggagttattgtcagagaggtttgagctgccatcagcgagatgggaaaagctgcaggaggagtaggttttaggggcaagatcagaaattcagttttgaacatgtcaagtttgaaatgtctgttagaaatgagtaagaggttgcatatacaaatttgtattactaagaagcctgagctggagataacaattttatagtcatcagtttatagatattgaaagtcatgagactgggtaaaattaccaagtagtgagtgtacgtagagaatagaagaggaccaaggacagtgagtaccatgggacatgagatcagtataaggtcggggagaagagtagaaatcagcaaaggagaatgagtggaagcaaacagtgcagtaggagaaaaaccgagagagtggtggtgccctagaagccaaattaataagctgtaaaatagaaggggataaaattatttgtttggcttatttttccttgaatacctactgggtgcaaagcgttgtgaaaaatatacaaagggatgagaattagtatgttgaaatcatttgtttgcatcgtgtaattgatgagtaaataatgagtaaagaactccttgtgtttctgggacaaaatgaatggttcctttattttgaaccatctgtcgtccttaggtgaaactatcaactcaggcataatcctagtgagccagacatcaagtacagacacatgttgtaaagtgtgccatttagatatctttctaacacagtgtgtgtgtgagagatttctcctacttatagattcagcttccacagaacattgtctttcctgagctagttctttctcaatttgcaaagatattcttatggaaaatttcagacttaaatactccatggacaattaagtgcactaaaacaacaaaaactgttaaggtacagacatacctcccagatactgcaggtttggttccagactactgcagtaaagccaatatcccaataaagtgagtcacgtgaattttatttcctagtgcacataaaagttgtttacacatatagtagtttattgtgtgtgatagccttatgtctaaaaaaagatatatgccttaatttaaaaatactttattgctaaaaaatactaaccagtcatctgagccttcagctagttgtcatcttttagctggtggagggtcttgccttagtgttgatagctgctgctgaccaatcagggtggtagttgccgaagattggggtggctgtgacagtttcttaaaataagacaatgaagtttgccacatcaattgactttctttcatgaaagatttctctttagcatgtgatgctgtttgatagcattttacctacagtaacttctttcaaaattggtgtcagtcctcccaaattctgctgctgctttatcaactaagcttaagcttatgtggtattctaaattctttgttgtcatttgaacaatatgtacatcatcttcaccaggagcaggttgtctcaagaaaccactttttttactaatgcataagaggcagcttctcatctactcaagttttatcatgagattgcagcaatttagtcacaccttcaggctccatcttcatttcttttttttttctttccttttttttttttttctttttctttgagacaagatctcattctgttgcccaggttggagtgcagtggcgtaatcacagcccactgcagcctctacttcccaggctcaagtgaccccacctcagcctcctgagtagctggtactacaggtgcatgccatcatgcgtggctgatttttttttttttttttgtagagacgaggccttgctatgttgcccaggttgatcttgaactcctgggcccaagcaatcctcccaccttagcctcccaaagtgctgggagccagcccaggctctatttctaattctagttctcttgctatttctaccacacatgcagttgcttccttcactgaagtgttgtacccttcaaagtcattcataaaggttggattcaacctctttcaaactcctgttagtgttgatattttgacctcctcccatgcttcacaattttttttttcttttaagtgatagtctcaatacattgcctggactggtcttgaactcctaggctcaagtgatcctcccacctcagcctcccaaagtgttgggattacaggcgtgagtcaccatgcctggcccacagatggttttaatggcatctggaatgatgaatcatttcaagacagttttcaattttcttttcacagatctgttagggaatcactgtctatgtcagctgtagctttatgaaatgtgtttcttaaataacaagacttgaaggttgaaacttttccttgatccatgggccacagaatggatgttgtattagcaggcctgaaaaaaatcactaatctccttgtgtacctccatctgagctcttgagtgacaagatgcattgtcagtgagtagtagtattttgaaatgaatctttttttctgagcagtgggtctcatcagtggacttaaaatattcattaacccatactgtaaacaaacgtgctgtcatttaggctttgttgtttatttactgagcacaggcagaatagatttaacataattcttaagggccttagggttttcagaatggtaaatgatcattggcttcaacttaaagtcaccagctgcattatcctctaacaggagtcagcctgtcctttgaagctttgaagccaggcattgatttctcctctctagttatggaagtcttaggtggcatcttcttctgatataaggctgttttgtctacattaaaaatctgatttttagtgtagccaccttcattaattatcttagctagatcttcaggataacttactttttatgttagtggaggtggctttttttcgtaaacttcatgaaccaacttccaccagcttcaaacttttcttctgcagccatctcatctctcaacctttttagaattgaaaagttagggccttgctgtggattaggttttggcttaagggactgttgtggctggtttgatggtttatctagaccactcaaactttctccatatcagcaataagactttttcactttttttttttaaatcatttttttgttcactaaagtagcacttttaattttctccatgtgccttttctttgcattcacaacatggctaactgtgtggtgcaagaggcctggctttgggccgttgttagccttcctaagtttaatcatttctagcttttgatttaaagtgagagataggtgactcttttcacttgaacacttaggggccattgtagggttattaattggcctaatttccgtattgttatgtctcagggaatagggaggccccaagagagggagatagagaaagtggaacagccagtggaacagttggaacacatacatcagttacgtttgccatcttacatgggcacagtttgtggtgccccaaaacaattacagtagtaacatgaaagattgctgatcacaggccaccatagcaaatataatgaaaaagtttgaaatgttgtgagaattaccaaaatgtgacacggagacatgaagtgagcatgtgctgttgaaaaaaatggtgctgctggacttgcttgatgcagggttgtcatgaaccttcaatttgtatttaaaaaaaaagaaaacaaccccacaataccagccaagcacaataaaacagagtatgcctgtacttctttgcgtcattatgccagaattccttaaagaagccacagtcataattagaccttgaacttggctgtttctcagctcaatccacatttaataccattctttataacgttcctttttttacttcagaatgaactccttatatttcccttaatgtttatttccctctcagtgcttaatgccatgatttgcacatattaaatgatgaataaatattttacaagccaaaatttggaaatacattttgtaaagtcatcatatgttaaaaaggtagcacttcgtattcattggaactgctaactttttgtttcttggacagtcttactcagcagcttggtttcagttagttgttataggctaatgcctcctaggattatgttttccaacttatcccctaaattttatgtgcttcagcttcatatatcaaccatcttgtcctccaggttcttcaaccacttgtcctaaattgagccatcattattcctcttccttcataatctgttggcagctggccgagttgctgtctctaggaatttgtattatttctcttcattcctcatagatgcaacttgccactaaactttgtcccctgaatctttttatttgcccttttcttacaagttttactactctaattcagtctgttttattgtttctacccccaaattattgcttgagtcattgagtcttgctgctagagtgatcttcctctcagatctgattatgttctactcttgctcagaattttatttcctatatttcctaggtatagattaacaatatgttgttcaaatcatttttgtgaattaaaagagaagctattaatatttatttcagagtaacaggttaaagagggactgtcccgcttaaactgagatatggttacctcacccagatgataacattaatttgtacattcatttaagaaataatatatctgatatattaaaaaccaaggttgtagagaggagttagacatggtccctattcatcaatgacttgggagacataagaaaacataaatgtaataaatgttttagttattagtgacaaaggtatgagtagggctttgggattgcaagatggggaagggaacaagcttcatgggggagcattgaattcccagtgttaaatgtcatgaattgatttctggatgatcaagagaggtcattccaagcagagaggcaggagcaaaagtactgatgatggcaagccatgtatacttgtagaataagaagccaatctgtaagtctagagcaggcattcccgttggaagtgatatcgctcccaaagatgcaaaaattgccttttatgggagtgggaaaaaaaatcatagctattggtatggtttgtggccctctaaaactcagccctaaactgacagtgtcttattctttagtatttaattagagatggggcagtgcttacgaaaaattgtctgaaaggttctttgggaggggatgaaaatgaaaaaaaggttgcagaacactggggctaatgtctaggatgtttggggatgatggtacatgatgtgagatgtttaatgatgaagctggacgtactagcagggtttggataatttcagaaatttggactccatcttataaataaaggagaaagaaccgttgcagggtttaaagcctggaaataagatcagttttataaagactactatgtgagcattttggagatgtaattgagtggggaggagcagactagagacagggaggcttatatgtatacaggtagactggacatgtattttatccaaactgggatattttccatgtgaaaggtaagactactagtgattatactaagataatatggaaaccaagaagtatggtttttttttttttttttgagacggagtctctgtcacccaggctggagcgcagtggcgctatctcggctgactgcaagctccacctcccgggttcacacaattctcttgtctcagcctcccgagtagctgggactactgccgctcgccaccatgcctggctaatttttttgtatttttagtagagacggggtttcaccatgttagccaggatggtctcgatctcccgacctcgtgatccgcccacctcggcctcccaaaatgctgggattacaggtgtgagccaccatgcccagccaccaagaagtatgttttgttgttagaaacaaatacagtagttcaggtgtgagataaggtcctggacccagtggtggcagcagttaagtgggatagtgaggtattaaggaggtagaattggcccaacctggtcactggttggaaagataatttctcctcctcccccagacttttttgaaaaactttgaaatgaactataaaacataaagtccatatgccctaaatatacattggcagatgattaatttgttttgtttgtttgtttgttttttgagacggagtttctctcttgtctcccaggctggagtgcagtggcacaatctcagctcaccgcaacctctgcctcccgggttcaagggattctcctgcctcagcatcccaagtagctgggattacagatgcctgctaccacacctggctgatttttgtatttttagtagagacagagttacaccatgttggccaggctggtctcgaactgctgacctcatgatctgcccgcctcggcctcccaaagtgctgggattacaggtgtgagccactgcacccatgcccggctactttttgtatttttagtagagacggggtttctccttgttggtcaggctggtctcgaactcccgacctcaagtgatctgcccgcctcgacctcccaaagtgctgggattacaggcgtgagcaactgcgcccagccattgccagattaatttttacaaacatattttactgtgtgtatcatgatacagaatacagataaagaatattaccagcactccagaaatttcccctttttccttctcagtctcccaaaggaaaccactcttctggttctgtcattgcagatttttttctttgtgcctttgaacttaatttgagtggagtgtttttgtttgtttgtttgtttgtttgttttgtttttaaagacaaggtcttgctgtgttgcccaggttggcctccagcccctgggctcaagcaattttcccaagtagctgggagaacaggtgtataccaccatgcccagctcattgtaagtattctttctggcagccaagaggactatgaagctaccttggttctttgcattttgcctttgtattggacttttaacctcctctcttggggctttccttgctattcatctgattatctatcctttatatcctgacactaaaatctcttctgtttctgtgcattgcataggatgggaacagtatggtaacggtgtcactggcctttgaattttgcatttggacaagcctacttcaaatctggactccagttctgagaatttgaccataggcaagttatctaacttctctaggattgaatatctttttgggattcttgtgtggaccaaatgagataatatatgtgaaataattagcaaagtatcttgataataaacagtaaatgatagcctacatattagctgactattttctctgtctggaaaaccatcctctggcctggtacattctgattcttcactgaaagctctagtgctcatttgcagaattgtgcatccttccttcctcacttttccactcctctgtgttcctagatactttgcgccttcttccaccgtagtaattactgtgctgtgttatgattacttgcatatttctctctgattgtaagctccttgaagacagtgagtgtacccttatctcccagtgttcattacacagtacttggtacatagtagatatctaaatatttgtagagtaagtgactttaaaaagaaaatcaaggccgggcgcagtggctcacgcctgtaatcccagcactttgggaggccgaggcgggcagatcccctgaggtcaggagttcgaaaccagcctgaccgacatggagaaacctcctctgtactaaaaatacaaaattagccgggcgtggtggtgcatgcctgtaatcccatctacttgggaggccgaggcagaagagtcgcttgaaccctagaggcggaggttgcggtgagccaagattgtaccattgtgcactccagcctgggcaacaagagtgaaactctgtctcacaaaaaaaaaaaaaaaaaaaaagcaatgtgaaaaatactgttcctttactattctagtagtgatttctactggtctaatatttaaagtgttcagataaaaaggcttgatgaagtttggcaaaatggcaaaatgtgctattactattctcattaagaataaagtagagttgccataaacagtgttttacttggcagttcttgagagacaattcagatggaggaaacttagtaatatcttgaaagaaagattccttttctgcatggcttcaaaacacatttgcagggaacatcacagaaaaatatagattaatgcccattttaactgtttatgttctttcaccagatgattcaaaacgtctgggcaaattttcatgctctgctaggtgttaacgtaattgcctacttagaagaagtttttttgttttgttttgttttgttttagaactaggtatttttggttattaaaaagttaaagaaggagctgggaatttaaaaaatgtaaaatttagtataaccatttattaatctgttacagaatttagaaaaatggtcttcaaatgtacacttgcagagtttttttctgaattggcgagagagcaccattgtacttggagtcatttttggagtgagtcactgtgcacatccctggttggcagaacaaagattctgttgtgctttcccacagcagatgcacattcagagggttccttggaaagaaaaagaacttatttatacttctggggccccttgaccttcatttgtaaatccagttggatagaaggggaatgttagatctggatgagacctggattatctggatgaacatcttttccaggcccatcattttacgtgtgttggagattcccaactcgatgagcttgactatagaatgagcgattttattaaaaactttagattgtggaggcataagcaacacatgtttgaggcataagcaacgcatgtttggcattacatgccaaaggtgagacacattctccactattttaataaaattgctcattctgtttttatttacagccagaccttagtttacctaggctggtccaaggtaaagtcaaatgataaacacagtgttatagagttcacagtcagtctgtcccttgcaaagaccaagatttttgtcgtgtagtcaggctcatcatgcctgcctccttcttccctttggagaattctgagggatattcctcaatctctcagaatcaaaatcttaagtgtctaaacttccaaatgactgcagcttttctcaagttaagaagccaaactaaaataggttaccatcctcttttttttttaggaaagagtttatgagtgtcacaagtgcctggtgtggagtttggattatttataggattattaaatgactctctgaggcacaggtgaatacataatttttttgagggagattgcctaatgaacatttgtgcggtaaatattaagtaagcactgtttcatgtgccagggataaaagattaaagatagttcttccatctggggaggagatagcaaaacacatggacaattaaaatatggcctaattaaatactgtgataattataaatatcaggtgctcagaagtttgtaggaaggcctttgggggagaagagcaaagggtaggcaggtgctgttcaagttgttttagaaaagggaaccctgatgagtttaggatacagttggccctccatatccgtgagttttgcatttgtggattcaaccaaccgagattggaaaataagttaggcccatgatcgttgtgcctgtgctgaacaggtacagacatttttcttgctagtattccctaaacaatacagtatagcaactctttacatagcatttccactgtattaggtattaataaataatctagagtaatgatttaaagcatacaagggccaggtgtggtggctcgtgcctgtaatcccaaaacattgggggctgaagtggatcctcaaactcctggctgcttgagcccaggagtttgagaccagcctgggcaacatggtgaaaccctatctctacaaaaaagtacaaaaatcagcagggtgtggtggtgcatgccagctactcaggaggctgagatgagaggatcgcatgagcccaggaggttgaggctgcagtgagctgtgatcgtgccactgcacttcagcctgggcaacacagtgagaccctgtctgaaaaaaaaagaaaaagaaaataaagcctaccagaggatgtctgtaggttatatgcaaatactacaccattttatataagggactcaagtgtctatgggttttgatatccacaaaggctcttggaatgaacccagtggataccaaggaacaactatatatagaaatttaagtgtagaagggaaggtgtgtttcttgaaagggtaacagcatatgccaaggccacaggatacgtatggtatgtacatgcaagttgcctaggcagctggaacactgggacaagaatgaatggtaaagtagatgaagctggaggaattgtcaggatccagatcatgaggaattgtgttctccttattaaggaatttagatttggcttccagaaagatcgctttggcagtatatgtgaagagtggattttaccgtgggcatggtttgtcatgcctgtaatctcagcactttgagaggccgaggtgggcagatcacttgaggccaggagttcgaggccaacctagccaacatggcaaaatgctgtctctactaaaaatacaaaaaatttgctgggcatggtgatgcgtgcctttagtcccagctgcttgggaggctgaggcgtgagaattgcttgaacccgggaggcggaggttgcagtcagctgagattcagccactgcactccagcctgggcaacagagtgagactgtgtctcaaaaaaaaaagaaaagaaaaaaaaaagaatggattttagaatccagttatttcagttattcactgggaaatactgaatttctaaattgcctcatttgcaatagtaaacggagatatttcgaaagtagaattgacagatttctggccagagccaatgaacctgagtactgttaactaaattagggaaccagtaatgaattttgcacttgagttgctgatgggtcagccaggttgaaagtgttcagtgtccagtagaacatatagtatctaagtttagtggagagctttgggctagaaatacaaatatgggagtcataggcatatgtgatagttgaagctatggatgtggaaggtattcctaacagtagagagtctctagtgaataaaaggcagctgttggcagttctggtaacataaactttataaacatttataggaataagaaaaaaatgagaaacctatgaaggagacttagatggagcagatggacccaaaataacaaaaagtaaaaactgaaaaaaagcagccgccgcagaaagctaataatggaaataaaatactgaagacttgcatactgtatggtggttattggatgcctgttgctgttatgaaaactttatatacatttaatccttcaagaaaccctgtgaaagaaggtattattatccacattttacatacggggaaattgaatcacagagagattaattagtctaatgtcacacagctagacccagtgtagtcaggattcaaacctaggcagtctgatttcatagtctgtgcttataatcgttgcttaatgtttctcattaagacgagaatccagaaagaaccatattacagaagggataggagagagaatgacatgtcagcagtcaaatgctgtagagaattcgaagagagataaggattgaaaagtacatgtggaatttagaattaacaagtattaggtgacttcataatgcatggtaggatcagaaaagtgaagtgaaaggctacactttgaacttataaacaattggatgctcaatcttttgatacgttgtaatttcagtggttaattattgaagtcctaaagtttaagcatatcattgagactttcattcttaaaaattaaaattttagggtgtaattttttaaaattatactttaagttctcagatacatgtgcagaacgtgcaggtttgttacataggtatacacatgccatggtggtttgccgtacccatcaacctgtcatctacattaggtattatttatcctaatgctatgcccccccgccctccagccccgccgcaacaggccctggtgtgtgatgttcccctccatgtgtccatgtatcctcattgttcagctgccacttaagagtgagaacatgcagtgtttggttttctgttcctgtgttagtttgctgagaatgattagtaaatgcgtgagccaccgtacctggccatctcacacctctgtttcatttttcaatccagggtctagtcaaggtatgttacgttacatttggttaccatagtctcctttaatctagaacagtcctgttttttttttttttcctttcatgaacattgcacttttgaagagcctggccggctgccttatagaatgtatcatgatctggattcatctggttgttttctcatgattagattaaggtgaaatgattttgttgagaaactgcataggtggtggtctgtacttcccgtattgtcccatcactgacacacattgtcagttctttccattattgggcatactaaataggatcatctgcatctcttttgttttaaaggtacaatgctataatttataagtgatccaaagttatagttggagaatgtgtgaatgtcgtgttctccaacagtggttttaccttgtgattttagcattcattgataatcctcacctaaattaactattactttgctgttacaaagtgataattttctttttttctttttttgagacagagtctccctttgtcactcaggctgcagtgcagtggtgtgatcttggctcactgcagcctctgcctcccaggttcaagcgattcttgtgcctcagcttcctgagtagctgagtctgcaggcatgtgccatcacacccggctaatttttgtatttttttttaaagtagagatggggtttccactgtgttgcctgggctggtctggaactcctgacctcaagtgatcctctcaccttgacctcccaaagtgctgggattatagttgtggaccaccatgcctggccataattttctgattctatatttcttttacatttgttagttgttttctgtatagaagagctttcctcaccttcctttctcctctcttttttaaatcactatgaagtaatggattattttttgtgttcaatattgtcatcctttttaattattaaagtgctccaaatatagccagtggaagccctttcaaagtcaggtcctatgtccttttgatgtgaccccattagtctttaagtacttttttgctttctggcataaaaagatgttccaggtcctgactttctttgctctagtactgaagtcagccgtttatccaaagaacttcagtcccctttagtgagaaatgaatttagaaaccaaagtctgggctccagttgtggtaaatgttttatacctctttactgccattttgccgaatgttgtttatacctccatgaatgagaaaatcaataagttctatgtttaatatatggtattaactttggcatattgtttaaatctccaaaatgctttagtagtctgtgtattttaatccttattttgtaattttagaatatatttaccatgtgatagcctctctgctgcacatttaataaacatttaaaaattttgtatttttagtagagacggggtttcactatgttgtccagccttgtctcgaactcttgacctcaggtgatccacccacttcggcctcccaaagtactggagattacaggcgtgagccactgctaactgggggtggtggtgggcgcctgtaatcccagctactcaagaggctgaggcaggagaatcgcttgaacccgggaggtggaggttgcagtgggctgagatcgtaacactacactccagcctgggcaacaagagtgaaactctgtctcaaaaaaacaatcgtttgtgttcagagatattttatcttttctgtggtacagataataaacgttaagcagattatccaagtttacacaagtagtaactaacagagctgaaataggcataatttaaacacggttgtctccagagtccaaattgggtttttttttgtgtgtgtgtgtgtggtgctgtttttttagagaccaagtatctccacattgcccagattggcctcctacttctgggctcaagtgatccctcctgcctcagcctcctgagtagctgggactgcaggcatctgccactgcatccagctgtcttccacattgttagactgccttccaaatgatttgtagaagattcctcagcataacttttcattatagaaccatagctgcagaatgtatgtatgatacagttgaatttgtgctgaccttaggatctatcctgggacatttttctttgttaaaattcctgggatagatttattttctaggttaagaagagaatgaataaaatatcttggttaatgaaagttttggataatgatgttttattgaaagttttgtgtgcctgggtgcggtgactcacacctataatcccagcactttggaaggccaaggtaggaggatcctttgagcttagttcaagaccatcctaggcaacatagaccttgtctctacaaaggaaaaaaaaaaagctgggggtggtggcacactcgagagtctcaggagggaggatcacttgagcctgggaggttgaggctgcagtgagtcgtgattgtgccactgtactccagcctgggcaacatagcgagagcctgtgtcagagaaaaaacgttgtatgtgatgaattaagtgtatcataggtaagaaattcacttgttttaaactttaagaaccagaaaaatgcaaaaattttttaagcatcccagtttgagttttccaagttttggttgattttctaaacacctgtagaaggacagtgaggagaattgggaaatggagtttccgagagcagcacagttgcttggcataacattgtaaactaaggaaggggaaaaaattccaacctgcttaattagaaatatatgtttaaattagtaattacttgtttatacagtgctccaaatatgagtttattttcatttaacaactaaattgaaaatccacagaatatacctgcaatgaatgctgtaagtaagaattgtttaaagggtatacaagagttgtcttgttatacaatggcagctgtccacccacctcagcttatcccaccttcgctataaaaactactggctgagagggtgtagcttatctgttttaggaagtaccaagtcatcaccacttcctcaccttcttcttctttttttttcgcccctaggtagaacccattattttattccctaatcctgagctggtacttgtttttctaatacccctggacaatttctgcagtattttgttgcagttacagaactagtgctgaatcagatgttactgatctgggatgtcaggatatgccaggtggatagttttcccacccttctcatgacttccctctttttttttttaattgagacagggttttgctctgttgcccgggctggagtacagtggtgtgatctccgctcactgcagcctccgtgcccgggttcaagcaattctcatgcctcagcctcccaagtagctgggactacaggtgtgcgccaccatgcccagctaatttttttgtatttttagtagagacggggttttgccatgttggccaggctggtcgtgaactccttacctcaagtaatccgcccactctgcctcccaaagtgctgggattataggtgtgagccactgtacccagccgacttccctcttgaaagctacatagagcagctttcaagtgcattcagcgtaaatgattagcacctccttgaatctagcatttaaattttttactgccgaagactgtctgtaagacttccagtctgactctgtcagggttctttctttttttatttgtgactttatgcctaatagataatatagtacctcaagcttatcttgcagataattgacacaaaagccccaagaaacccttttccaagctcagcattacagactccacaactccatgctgtcctgtgtaaacaaaatgccataacccccacatcatatgaaaaagaattaatcagctcaccactacaaccattctttattctgttttgtgaatgcttagcattcttgtgaccctcaaactaggtacacaaagaaagggactaggatttactaggcatcttaatgcttgttgtctttcgctattaataggtcagacaatccagagtgacatagatcccacttataaacagtggttctcaaactttagtgtgcagaagaatcacctgtaggacctattaaatcacagactgctggtccctacaacccagatattctgattgactagatctggggtgaggcctgataatttacatttctacaaagttcctaaatgatgctgattgtgctggttcaggatctcacagggttattacttacatgcaacagaacccaattttggccaatcgaaagaaataatttactgaaaggattctgggtagctacagaattacttggaatactggaaaaccagacttggggctaggcttgggatactagaaaaacaggcttgggtctgtgacccttatcacagatttggtagatactactgctactagcagtgaatagtgagtgccacagtttgcactgtggaccacctgtactgtccattgcgtatgttgtagacccttgatatggtttggctctgtgtccccacccaaatctcacgttgaattgtaatccccagtgatgggggagggacctgtgggaggtgattggattatgggagcagatttgcccccttgctgttctcgtgatggtgagagttcattctcttgagatcttgagttgtttaaaagcatgtagcacttttgttctactttgctgtctctctcctgctggctatgtcgagatgtgcttgcttccctttcaccttccaccatgattttaagtttcctgaggccttcccaggcatgcatcctgtacagcctgcaggaccatgagccaaacctcttttctttataaattaccgcggctccggtagtctttttctttttctttctttcttttttttttttttttttttttttgagacagagtcttgctctgtcacccaggctgaaatgaagtggcatgatcttggcttgctgcaacctccgcccctcaggttcaggcgattctcctgcctcagcctcccaagtagctgggattacaggcacctgccaccacgctcagctaatctttgtatttttagtagagatggggtttcaccatgttgaccaggctgatctccaactcctgacctcaggtgatccacccaccacagtctcccaaaatgctgggattacaggtgtgagccactgtgtccagccgggtagttctttatagcagtgtgagaatggactaatacaaccctgctgcagccactggctgcccaagcggattctatgcagttcttgcttctcggtgtcactagcttctgatttaaagtctgggatgaatatgtctaattggtaacacttgaataatttgcccctgcctttgttgtatgggaggttggaaaaataaaaatttggtgttttcagctttcatggtgggagacagaactccactgaaacttataaggtggtctgttgtcagagaggagctcattcatgcttggccacactgtagctatttttgaccatatgtttcaggagctaacaaaatatgaccagctatttttgtaagtaaagttttattggaacagtcacacccattcatttacctgttgtccatggctgttttcatattataaaagcagagctaaatagttgtgataaaaaaccatctgggccacaaatatttactatttggccctttattgaaaaagtttgtcaacccctgacaggaataatgctgacatacatacatatatatatatatatgaagagagagagagagtcacacacagacagacagacacacggagtctcgctgtgtcgcccaggctggagtgcagtggcgcaatctcagctcactgcaagccctgcctcctgggttcacactattctcctgcctcagcctcccaagaagctgggactgtaggcgcccgccaccatgcccggctaattctttgtatgtttagtagagacggggtttcaccgtgttagacaggatggtcttgatctcctgacctcatgatctgcctgcctgggcctcccaaagtgctgggattataggcgtgagccaccacacctggccataatgctgatattttagttcagggtcatgcagtcaacattacagatgttgtgaaggactacatgttcatttgtccaaattgtccctttaaaataaggagattacaaacaaatatttgaagctctttgaggaggggcttttcagatttaaagtgataaaccttattagtctctctttaggcagagaactgaagatacatgtatatctcaaacttgtgagtgaaattctctttcagactttaacattgaaaagttaatttctaattctttctcatatattcatggcattgttaatgatgtgccgaagatgtcctgtaacttgagaaaggagaaaattatatgatataagtttagttgagagtcttagaaaattctggttccctgtaacactagcctacccacatggagtaagtcaagttatgggagttctgtttgccataacctaacttttgtgtattacaattttcagaacttgtttgccaccagaacaagttgtcttgtcaaaaattacaagcacatttccacaggatagacattttgtgagtgcctgcctgcctacacctaactcagtggttggggcccaggcagccgtgtttgtagtacagacattccttgacttacaatggggttatatcataatacaaccatggtaagttgaaaatcttgtaagtcagaaatgcatttaatataccttacctaccaaaaatcatagcttagcctaccttaaacatgctcagaacacttacattagcctacagttgggcaaaatcatctaacgcaaagcctattttataataaagtgttgtgtatctggtatgatttattgaatactgtacagaaaacggtgaaaaacagaatgattgaatggatattcaaattatcgtttcccaggctgtcatcaccaaaaaaaaaaaaaaaaaaaaaaaaattagctgagcatggtggtgcacgcctgtagtcccagccacttggaaggccaacgtgggaggattgcttcagtcctggagatcgaggcatcagtgagctatgattgccgtcactgcactcagcctgggtgacagagtgagaccccgtctctaaaagcaaaacaagacagaaacataattcagtgtccactgaatgcatatcgcttttgcatcattgtaaagtcaggaaatcttgtcgaaccattgtaagatggggactgtctctatatggccacacttactccggctattgttacataataaggcatgaaaaaatgggggaaagtgtataatttgggaagaaagaaataatactgtattcataggcagggccattgtatatgcagagaatcaaaaataatctacaaactctgaaaattaagtgaatttattaacaagatggttggactcaagtttattatatagaatcaattgatttatgtaaaccagcaataaaccaaaaagcctctagtttaaaaaatgactctttttgagacaagaatctcactctgtcacgcagattggagtgcagtggcatgatcccggctcactgcaacctctacctcccaggttcaagtgatttttgtgcctgagcctcctgagtagctgggattgtaggcatgcaccaccacacatagctaatttttgtatttttagtagagacggggtttcaccatattagccaggctggtctcgaactcctgacctgagttgatctccactcactttggcctcccaaagtattgggattacaggtgtgagccaccacacccagccaaacatgacattatttaaaaatactagaaaactaaatatttaagaataaatccaacaaaaagtatagaaaatttatttactgaatactacaaagtgttcgtgttagtctgggttctgttagaagcagttgtcacaacaatattagacatgcaaggaatttattagggaaaatgcctctgagcaaaaatggagagagttggtagagcattcacaccagaatgctcatgtgacatttgtgaaggagagacgaaaggaagtttgagtggaagagccttagactgcactgtaacagtggtttagcaaggtggaaggagaatccttgaacccatcagagtattcctgagtctcccagaacaggcattccttagtatttttaccaggctcagttattgattgggagtatcgcatgggaagctgggccccagttcaaacatgttgataaattacagagccccgtaatagggattttgttcaaatacactccctgtagtttggaatctgagaggcatattttcaaggccacctgagcttacactttgcaccacacaaatctacttcttcacataggtttgaagttcagggagcagctcctccatggctctcaatgagcttcttttcctgagaagaaacttagacaagagatggtggtgggaagaattatagcccctgtatggttgatctcggggttgcaactggtacttatcctctctcctccactatgcattttgttttctcctcacataatcagctctgcaggtctcagtggcttatatgttggtatgactcaagccttctttcctgaaatgtctgaacccttggtaatcattcttctcaggctaatgctgggatatatgtccgtttacagttacagtgaggtaaaggaataaccaagcgagtcatgtggattccacacattcctctctgttcacattacataaaagcagccctgcgtccacctactgctcaggatcagttatccctgccaaaatggcaactcttcttacctgctgattcttgggccctggtgtttaaagtgccctggtggcagctgtaaacttgttcactgagactcttgtactgttgcctggcaagagtataggcctttggaaccaggacctgcaaacatgcagagtccatagctgtaggaatgggaagtacaaaatccctttgtggctcattgggaataatgataaatgggtgactcttgcttctactcatttgtttctaggcccatctgttcttcctgctgtatacactgctccatatagaggtctgtggtttgatgtatcttcatattaaaaggtgtcattccattatttcacattattgcctttaagctgaaagttcagctatgcctttataaggttattacagcgttctgtgaggccagttgcttctggattgtgtggtatgtgatatgactagtggtcccaaggttgtgatcatactcctgtgtttgctttgaattgggtccactggttggactctggtatgtgggattctagtcctgtggttcaggcattctggaagcccctggattatgatcctggctgaacctctgaggtaagtaagataaacccaaacccagaatatagatatctatcactgtgaaatgaactactggccgttctgggatgagagacaccatatatagtctacttgttatcaaatgactggttgctcttcttgaataataggatcatatcaggaactcatacggttggtctctgttgctgacaggttggacattcagaagtagcagtagctagacagaccttgataagtggaagtttatattgttggacacatgtgtagcctctatctagtgtcattgtggtcagtctaatcatctattaattgtgccagttctgggatatccttttttatcttcatggttgttcagtgcctcttccatgtttaatgccttttggtgggcattagtgtggaatacagaaaactttatacactttgtgcccattcccatgtctccatcctgtgtctttaccctatccctccttgtccctgatctttttgtctttttccttctagacccctgaccagacatccatgcactggaatttacatatattttcaccttgggccactgtcttgtctgttttgtgttgctataacagaatacttgaggctgggtcatttataaagaaagagctttatttggctcacaattctggtgactggaagattctagattggccacctgcatccaatgagggcctcagactgcttctactcatggcaaaaagtgaaaggggagcaagtgtgtgcaagatcacatggcaggctgggcgcagtggctcacgcctgtaatctcagcactttgggaagccaaggcagaattgcttgagcccaggagttcgagaccagcctgggcagcaaagcaagaccttgtctctacagaaaataaaataaataaataaataaaactaaatgggcatggtgttgtgtgcatgtgcctgtagtcccagctactcaggaatctgaggtgggacgattgcttgagcccaggaggttggggctgcagtgagccatgctgatgctgcgaaaaaaaaaagagatcacgtggtaagggaggaagcaagagagagaaaccaaggaagccagactctttttaacaaccctctctcgggggaaccaattggtttctgtgagagtgagaactcacttaccccctcagacaagcattgatctatttacaagggatccacccgcatgacccaaacagctcttgctaggtcctacctgctaacactgctacattggggatcaaattttagcatgagttttggcagggacaaaccatatccaaaccatagcagctgctatcctttggcatgacccatatctactgctcacaactctacccattgaggagatttttccttttctctttcttttaaggctgttcctgaatgtgacttcaacatagcctgtcaaaaaaagagttaatagaacagatctgagactgctgtccttaggaagacctatttgtaaagtagtcttttttggcggctggcatctgggaacttggatttcaggaatgttcccagcatttcataactgataagatttaaaatatagacattcttatccagggttaacagactttttctataaagggccaaatagtgaatgttttaggttttgtggcccagatgatttttcttacaactacttaactctgcttttatagcatgaaaagagccatagccaataggtaaatgaatgggcatggctatgtttagcagtatctcttctacctacatgatgccagtagcaccactccctcaaaattgtgacagcctaaaataactccagacgttgctaaatatcaccaagatgggaagaatcagtcttagttcaggactactacaatgattttttcaggtggatctttacttcactttagatatttccggatgtcctatcttatgaaaaacgttttatatatttgtcttttttgttgttgtttttagttgttttaggtgaagagtaagtctagtttcttttattttatcttgacctaaagccaaagtcacttcgacattgcaggaggtgtcctgacgtgcccccaaccactgtatcccgaaaaacttcactgaaatggcatatcttttgagtcttcatagtgtttatctcccattttctggagccgcatgtgtgttaccaaggactctaagggtaccagtcacctctagcctattcttttattcattctgtccaatcagcatgatgtaatatatgtaaatagatcaggaggtttagatgtctgtcccccacccaacccccactgactgtgttatgacagagagcggaagagttaagagtcctaagataaaactgtaagttaatattgccttgcatggatgcagatttttttctgatcttctaattggaatggaaagtaaagtaatggaaagtaacaccacatcagtatttgaggcttaatcagcttcagcagcaatattatggctgagactgcaggctgtgattagggctagaatttggttcattctgtggtagtctgcacagtcattttttaggatctgtctgctttctccataaattaaatagaatacaatagaaactattacctctgcgtacttctgagtctttactggtggcactagtctttattctgtgcccctctggaagaaatagtcttttatttactgtcttgttctggggaatggggcagaggtttccacttggctttttccattgtgacggcttttaccacacaggtcatggacccattatttagggtattctaactgccaagtatataaattctaattataaactgagggagtggggaatgaccattattaggtggatctgcagactcagtggacccactgtgagccacacttttgccatgactctctttattacctacattcagcaggttctggctgagtggttggtgcttttaccccgtagagcctcaattgggatcattcttttagttccattcaattggtagctctaagctgctctaggaaggcataacttacatatctagtaccttggtgttattccatgtggcctttctgcctccctaaggctagctggagcttcctcacaacattagtggtctcagggtgcttgaatcttttatacaacctcacttctatcgtattcttttggtcagaacaagtcacagagccaacccacatctgtggggagggcacatagattccaggttttgatgggtaactggcaagactgcattgcaaaagagcatatgggataagaaatacctctgtggccatctttggaaatacagtttaccatatcagtgcttcatctgctatctgctaaaatttggtagacctttcttttaacctattcaaatctttatttttatatacttaaatatctttttcactgttactttagtaaggatttagcagaaataaatgtggttgttcaattcactgtggttaattgacagttgttatctttggaattagagattattgcctttttttttttttttttcccttgagatggagtctcaatcgcctagactggagtgcagtggtgcgatctcggctcactgcaacttcttcccaggctcaagccatccctcacacctcagcttcctaagtagctgggactacagatgtgtaccacaagcctggctaatttttttaaattattttttgtagaggcaagtttcaccatgttgcccaggctggtctctaactcctgggctcaagtgatccacccaccttggcctcatacagtgctgggattacaggcgagagccactgtgctcagcttgatgcttttcttttcttttctttttcttttttttttttttttttttttttgagatggagtctcactctgtcacccaggctagagtgcagtggcacaatctcagctcactgcaagctccgcctgccgggttcacgccattctcctgccttagcctcccgagtagctgggactacaggcacctgccaccatacccggctaattttttgtatttttagtagagatggagtttcactgtgttagccaggttggtcttgatctcctgacctcatgatccgcccgcctcgacctcccaaagtgttgggattataggcgtgagccaccgtgaccagcctagcttgctgcttttcttaatggctccgtgttgtcttattaacctactagaaaacaagttgtctttagtttctcccccagtacccccactactatctgataattttcttggccagttgtatatcagagtgggaaggcagtgtttggaagtagtttgccctggtataaaggcattattcctcataggaaataggaagtatgttttttatagcgaatttaagcttgtctgctttttattttttatttatttattttttattatactttaagttttagggtacatatgcacaacgtgcaggttagttacatatgtatacatgtgccatgttggtgtgctgcacccatcagctcgtagcttgtctgcttttaatcttaaatgacatcagtggtacaatactatttgctgttagggatctatagactctttccactttcttctgctatgccactgctcttagttgaggttatactatgtcatcttgaggtttttgttgttgttgttgttttaatgcctagttatctgggtgaggaatagagaaagatgttctacctctttcacagagtgaacaataggattgtaccattggaaatcttttttatttagtggtagattatgtcattttgagtctctttagaaagaaattctttagaaagtcatattttaagaggaatattgataaactgggtcatctctagagatgtcagccaggatattggatatcaaatatttggaggccactaaagaaggaaagtttacatctgcttagaagtgaaataatgaattaatatactttcatataaaataatgaatttggggttctggcattgtttgaatgaatagaggccattggtcacgttgaagaggagttcctttgagagctgagggatctcttctctgccttttcaaatcttttatgattcagaggttttatgatttttccatagttaactgctttgccataagtggttgtttgcttaaaatcagaattgtggggtgccttatattttaaacagcatatttgaaaaataatctaatttttttcttctgttccacaggacttaaatactatttattcttatcttcatggaatggaaatattatcaaatctcagggaacatcagcttaggtaagtgtcgttctgtatttaagagcacacgctgtatagccattcattcatttattcaccaaatatttgttaagcacctttatattccttattgttttaagcccttggtatatgcattatagattagatccctggtttcctggagtttatattttggtaggggtgattttggagttggggaaaaacactgacaataaaaactgaatttgtttttcttattcagtttttcttagccatgggaccttaagtcagaactaacctttaactgtggttttgtcttcaataaaataggggtaatgatagtatctttgttgaagtatttcaaggattaaatgaaaataagtacctaaagcaaaacacagtgttgaggttgtgctagttagtaaagacaaaactcctgttatctttttgtagtttgtgttgatatttattatgccaaatgcttcagctgggtatggtatgttgtattatagtgttgtattatacaagtgaaaggagcaggaatcttgatttggcctaagctcctgtggagaaaacccataaactttctgaaccttgtttttttcttctgaaaaatgggctggctatctgtcctggttatcatatatcattatgattatatttataaaaacactttcgagtgctataaaacacttaactatataatattttaattaaacatgtgttcccaccacgaacagcttatccagtgacttttcctgggttttcatcaagtttctggttattgaccagattgataaaatataattattagagatttattatttattatatattttctgtataacataattcagctgttagtgtatgccaaataattatatcaggaagaaagaaaactgaaaaattagcattttgtaatactcaaaatattttttattgcaaactgatttatatattcagcaatttttttgtatgtacatgcctctgccagtaactgttcttcacactgaggattcagtagtgaatcagacaaatgtatattttttgtaatgaaaacattatttggtgtgaactgacagattttgacagattttgtaatgtacataaagagtattaaggttgatgccactgaatattacctatattattgcattatgtatatatataaaatacacatatatttctaaactctctgtagtttagtgacaacatactggtagatttggtcattttctaacaatcaattagattataataattagttgaggtcaaattataacaattttaaaaacaaaatgtaagataaaatcttcaatttttttttttaatagattaatgtctgcaagagcacgctatgagagatacagtggcaatcaggttctcttttggtaagtatttccataattcacataaactaatgacttttatgtttaaattttaactcttagcattgaaattcatttgattctgggacaatttatgtagagcacactgaaaaatattcatagaccatgaagtatataacatacatagaatccaccaaaagtgtacaaagcaatgaattttaataaatatatactaaatgtgtaatgactactcagatgaaaatagagataccagttttccagaaggctctaatcaactttgaaaggtaatgacaattctgacttgtatcactgtaggttagttttgccacttattgaacttggtatagagagaatcttttggtgatgcttttttacttaataaatatccaaatttttctgtttttgtatgtgttctttttcactgctgtacaatatataattgtgtgcaaataatgatttgtttgtcccttccactgttaatagttgggttatttctagttttctttttgtttgtttgtttgtttgtttttgagatggagtttcgcacttgtcgcccaggctggagtgcaatggcataatcttggctcactgcaacttccgcctcccaggttcaagtgattctggtgcctcaacctcccaagtagctgggtttacgggcattagccgccatgcctggctactttttgtatctttagtagagatgaggttttaccatgttggtcaggctggtctcagacttctgacctcaggtgatccacctgcctcggcctcccaaagcgctggaattacaggtgtgagccaccgtgcctggccaatttctaatttttagtattataaataatacagtttctattaacattctgttatttttgtgcccttattgcttactcctgttgaggatattcctaggaataaaattatggtcatgtgccacataacgttgtttcagtcagtgatggactattgtgtcaagttgcctgcagtattcagtagagtaacatgccgtgcaagtatgtaaactaggagcaataggctataccatataacctagatgtatagtaggctataccatcttctaggtttgtgttaagtacactctatgatgttagcatgatgaaatcatctaatgatgcatttttcagaaagtatcaccatcattaagcaaggcatgactgtagtggaaatgtgcatgttcaaattcaggagattgtgacagttttttaaaattagttgtaccaattttttttttttttttttgagacggagtctcgctctgtcgcccaggctggagtacactggcacaatctcagctcactgcaagctccgcctcctgggttcgtgccattctcctgcctcagcctcctgagtagctgggactacaggtgcccaccaccatgcccagctaattttttttgtatttttagtagagacggggtttcactgtgttagccaggatggtctcgatctcctgacctcatgatctgcctgcctcagcctcccaaggtgctatgattacaggcgtgagccactgcgcccggccaattgtgccaattttaataaccattagctgtgtatagttaagttccagttgctctacatgtttgacaacccttaatgtttgtgttttattgtttgcttattttgaatttttgctactctgctgctgattacattatgttagttcattgtgattttattttacattttcctgttactaatgatgatgaatgacatttatgtttctatcaggtatttggatagcttcttttattaattgggttgtctttatcatttctgttgatttgtaaaagttatttttgaattctgagtggaagtcctttgttgggtatgtctagtctattatctatttccactgtgccacttttccttttttttttttttttttgagacggagtctcgctcttgtcactgaggctggagtgcaatggtgtgaccttggctcactgcaacctctgcctctcgggttcaagggattctcctgcttcagcctcccgagtagctgggattacaggcgcccgccaccatgcccagcttattttttgtatttttagtagagatggggtttcaccatgttggtcaggctggtcttgaactcgtgacctcaggtgatccacccgcctcggcctcccaaagtgctgggattacaggcgtgagccaccgctcccagccttctttttttttttttttttgaaatggagttttcttgcgttgcccaggccagtcttgaactcctaggctcaagagatcctcctgcttcagactcccgaggattacaggcatacgccactacacccagctctttttgctctattattggcatcttttgagaaagagtaattcctttctcaacttgtccccttgtgattagggccttttgtgtcctgttttaaaaaaaatcaaatctttcctttcttcatgattgcgaagattttctttgtttctcctccaaaagtttggtgttttctgtctcaaatatagatctacaattcatcttggaattgagttttacttttgatgtgaggtagaattcaagattcatttttcttaattttaaaaatatttattagtcattttaaatttaatgagaaacccatcacgtttctttttttccttccttccttccttccttccttccttctcgttagttcttttcgtctcaccatgtcacccaggttggagtgcagtggcgcgatctcggcttactacaacctccgcctcctgggttcatacgattctcctgcctcagcctccgaagtagctgagactacaggcgcgtgccaccacgtctggctaatttttgtatttttagtagagatggggtttcaccacattggccaggctggtcttgaactcgtgacctcaggtgatctgcctgcctcggcctcccaaagtgctgggattacaggcatgagccactgcgcccagcctcattacatgttaacacaattaacatttatgagaaagaactattttcataaaagatttaattatagtttagcaaatctaatatctttctgacattaatcggattgtcatatctgttgcattcagtctgttgtgatatattttttgaatgaaagaagtcttcatacagagaagttgttaaaacaaaaaaaaatgcgggaaagttcttttcagataagttgggtattcttctttaaaacagtaccaaaacttgacaggttgcttacagattagtttcagtatggggtctgagactttatccatgaactttttactgtgttgcattagaaacaattggtctatcttgcacattgaataaatcatttctctatgtttgatttttgtaatgccatgcgttggccatttggaaaatattcatggtcctggtgtatgtagtttttctcattttggcactttaaaaaaaaatttatcaaaaatggcattgctaatatcaccaccagcctcttctgaaaagtttagggaagtgtcaagctcacagtaatggatacaaattttctaaaatgtaaattgttgattgaaggcatggattttattattggcaagattcattaggtatccctatggacatccagttgatccagcaccatttattgaaaaactatctttttctctcttgcgctgcagtgtccactttgtgttaaattaagtgaccccgtgtgtgtaggtgtgtgtgtgtgtatctctgtgtggtctctttattttgctcaattgtttattgctcatttgtttattgtttattttgctcatttgtttattttgctcatgcctgtgttcatgcaagtactgcactgtcaagctgtgtagtttgagtttttttgtttgttcgttttgttgttgttgttgttttttgtttttgagacagagtctcactctgtcacccaggctggagtgcagtggcaaaatctcggctcactgcaacctctgcatcctgggttcaagcgattctcatgcctcagcctcccgagtagctgggaccacaggcgtggaccaccatgcccggctactttttgtatttttagtagagacaggatttagtaaagacggggtttcaccacgttggccaggctggtctcaaactcctggcatcaagtaatccgcccgtctctgcctcccaaaatgctgaaattacaggcgtgagcccccacgctcggcctaagctgtgtgttttgatatctgatagcatgagtttgtattcagtagagtaactcaggcttgtactcaggcttgttcttcaagattgtcttggctatcactgttgctttgcctttctgtgtaaattctagaatcagcttgtcaatttccacacacagttatacacaagaaagcctttgggaggctgtgggctttggattaggatagcattaaatccataaatcaattcagagagaaatgacgttgttacaatgaatctgtcaatctgcaaacatgtatattcttccatttatttagtcttctttaattcttcacagcagtgttttaggagggtgtttttccaacataaacagtttgagcagttttttctgtaacacttttaagatgttttatcatgttcttgcttctatttatgttgaagactcagtaatcagtgttcttgttactcctttgcagttaatatgttttttcctctgactgcttctgagatttttcttgctttttgcttttcagcagttttgtctaatgttgctaggtatggttttctttggatttattctgtttagggtttatagatcttcatgataccctgatttgatatctttcatcgattttggaaaattcttacagagtattttaaaaattattgcttctgtcctgttttctctttcctccttcctgctttattttgtcccatatttcctttacactgttttccatcttcccgtccttttttctgtctgtgtttcagtctcccattttctactgccttattttctaatttgtgaatttctgtcttctgctgtttctagtctaaaatacccactcatgtgaatttttaagttttaattgtagtttttcaattctagattttcatttctgtttcatagataccagttctttggttgaatccatcatctgttttccttttttcttgaacgtaataaatatagcaggttttttttctgttggttttaggttatttggtctcatttccagcaatgttgatactttttttaactttttaatcgacacattatagttgtgtatatttatggagtacaagttggtattccaatacagttatgtgttatataatatacaaattagggtagttagcatatccatcacctcatacatttaatcattttttggtggtgaaaacattcaaaagcctctcttctagctattttgtaatatacagtactttactgttaaccataataatcctactgtgcaatggaacaccagaatttatttttcttattttgttgtaactttgtacccactacccaacctctcctcatctttctctcccacctccccactccagtctctggtaaccacagttctactccacttctatggtatcaactttttattttttagattccacgtataagtgatattctgcagtatttgcctctctatgtctgtcttatttcacttaacataatatcctccagttccatccatattgctgcaaatgacaggatttcattcttttcatggctgaatgatactctattgagtatatataccccattttctttatctgttcattcattgttggacacttgggttgagtctgtattttggctattgtaaaatatgggagtgcagatatttctgtaacatactgatttcatttcctttggatatgtatccagtagtaggattgcaggattacctagaagttccattttttttttttttagtaacctccatattgttttccataataactactgatttacgttcccaccaacagtgtataagtgttcccttctcctgaaatcctcgccaacacttgttttcgtctttttgatggtagccattctcactggaatgaagtggtgtcttgttgtgatttgagtttgcatttccctgatgattagtttatttgaatatttttttatatacctattggctatttttatgtcttttcagaaatgtctgttgagctattttgcccatttttaatcagtttttttttgctattaagttttttatatattctggatattaacccattgtcagaggtatagtttgcaattctctcctatttctgtaggttgtctattcattttgtcagttgtttcctttgctgcgcaaaaactttttagtttgatgtaatcagatttatctgtttttgtttctgttgcctgtgttttgaggtcttcgctttaaaaatccttgcctagcacagtgttgtatagcattttcccctattttcttccagtagatttcgtggtttcaggtttcacatttaagtctttaatccattttgagttgatttttgtatatagtgagaggtaggagtttagtcttattcttctgcaaggagatatacattttctaagtgtctttggcaccttttttgaaaatcagttgtctgtttaattctgggatatccattctgctctattggtctgtttttatgtcagtaccatgcttttttggttgcagtagctttgtagtatattttgaggtctatcgatctgtccattgctgaaagtagggtatttgcattccctgctattactctattatagtctgtctctccctttatatctaatgatatttgctttacaagcttgggcactccagtgtttggggtgtgtgtgttaatatatactgtaaatatatatatgagacacaaatatatattatataatgattatataatatatattataaataatgtaattgttatatcttcctgttgaattgatccctttatcattatataatcaccttttctgtctctttttacagtttttgacttaaagtaagcatggctactcctgtttgctttggctttccatttgcatggatgtctttttctatcctttaacttttttttttttttttatatgatggagtctcgcactgctccccagggtggagcacagtggtgcgaccttggctcactgcaccctctgcctcctgtgttcaagcgattcttgtgcttcagcctcccaagtagctggtattacaggcgcgtaccaccacacccagctaatttttgtattttttagtagagacagggtttcgccatgttggccaggctggtcttgaactcctgacctcaagtgatctgcctgtctcagcctcccaaagtgctaggattacaggcataagccactgcacccaacctctgtcccttaactttcaatctatgtttgtctttaacagtgaggtgagtctgttatacgcagcatacatttgggttttattatccattcagccattctatatctattaattggaggagcttacccagttacattcaaggctgttatttataggtaaggatttattcctgcctttgtgttaatggttttctggttgttttatagatttttttttctgtagccttctttctctcttgttcatctctgtggttttgtggctcactgtggtgctatactttgtttcctttctctttctcctttgtgtatctgctgtacttactttatgtttactatagagctagcataaagactcttgttataatgcactattttaagctgatagcaaattaactttggtctctgtattactccattctcacgctgtcataaagaactacctgagactgggtaatttgtgaagaaaagaggtttaatttactcacagttccacaggcttcacaggaagcatgagtgggaggtcttaggaaacttacaatcacagcagaaggtgaaggggaaacaagcactccttaccacggtggagcaggagacagagagagaatgcgatggggggaaatgccacacttaaaccatcagatcttgtggaactcactgtcatgagaacagcatgggggaaaatctgtccccatgatccagtcgcctcccaccaggtccctcccctgacacatgaggattacaattcaacatgagatttgagtggggacatagagccaaaccatattattccaccactggcccctcccaaatctcatgtccttctcacatttgaaaaccaatcatgccttcccagcagtcccccaaagtcttaactcaatccagcattaacttaaaagtccaagtccaaagtctcatctgagacatgggaagtcccttccacctatgagcctgtaaaatcaaaaacaagttagttacttccaaaatacaatggagatacaggcatggggtaaatgctcctgttccaaatggtagaaattggccaaaataaaggggctacaggtcccatgctagtccgaaacccagcagggcagtcattaaatcttaaagcttccaaataacctccgttgactccatgtctcacatccagggcaccctgaggcaagtggtgggctcccaaggccttgagcagctctgcccctgtggctctgcagggtacagcccctgtggctaccttcatgggctggcgttgagtgcctgtggcttttctaggctcctagtgcaaactgtggttctaccattctggggtctgaaggacaatggcccccttttcgcagctccactagatagtgccccagtggggactctgtgtgggggctccaaccccacattttccctctgcactgccctagtggaggttctccatgagggctctgcctctacagcacacttcttcctggacatccaggcatttccatacatcctctgaaatctgggcagagattcccaaacctcaacttttgacctctgcgtacccgcaggcccaacaccatgtggaagccgccaaggcttgaggcttgcagcctctgattcaatggcttgagctatactgttggccccttttggccacacagttttaaactagcaaatcttgtgagagctcactatcatgagaacagcatgcggtaaatctgcccccagatggagctggagcagctgggatgcagggtaccatgtcctgaggctacacagagtagcagggtcctgggcccagcccatgaatcatttttggttggcctctgggcctgtgataggagaggctgccttgaaagactctgaaatgccctggaaacattttccccattgtgttggctattaacatttggctccttttgtgcacatttctgcagcgggcttgaatttctccccagagaatggggttttcttttctaccacattatcaggctgcaaattttctaaacttttatgctctgcttccctttaaaatataagttccagtttcagataatctctttgttcatgcatatgaacgtacacttttagaaacaatcagatcacctcttgaatgctttgctgcttagaaatttcttctcccagataccctaaatcatgtctcaagttctaagttccatagatctgtagggcaggggcaaaatgccaccagtctaattgctaaagcatagcaagagtgacctttactccagtttccagtaagttcctcatctccatctgagatcacctcagcctggacttcattgtttatatcacttatcagtattttggtcaaaagcattcaacaagtctctaggaagttccaaacttttccacatcttttctgtctttttctgagtcctccaaaccattccagcctctgcccgttacccagttccaaagtcacttctacattttcaggtatctttgtagcagtgccccactattactaataatttgtatttctattattgcacatataattatagcaaaattagaaaacataggcagtgagaaaaacttcatctgaaactttgttgtgaagaataagaatgatttctctgtggtaaattccttgggataacattgtggagctaaaggttatgacatccttgtggcttgtgctgaagattcctatattgattggaaaaagggttttggtgattttgatttgtagtattagtaagcagtgaataaatttttatcacagcccctgtaaaatggatactatatgtggatttggttagtattttagagttgttttcatttgcattttctgtttactagtgactctgtgttctgtgtagctgttaagaattgtctgttttaatcttctgttcatttactacttgaaatagtaatgcatttctgtgagtactgatacctattacaggtattatctttaattgtatcacatttgaaaattattttctgttcatctttttgttgtattcaagttttaacttgtatgtgctaatatacttcagaattaaatgttattttcttctacaagtgtgatacaattcttctgttttctttttttctaggaaacatgtttcttaattgctttcttagctttaaagctttaattaaactgaaatttatttcaaggaacagtataaacaatgattgttgttttttgctaaaatgtatttccaaaatactttattcactttaagtattggtgttttatagtatgtatcttaagatagtgattatacttttatttcacataaacgtggtctgtataaaaccttaggcaacaggcaaaatattccaaatttccaggtagtgttacttcatttttaattatttgtactattatcagaatatatttcttattgaattcatatacatatgaacatgtgtgttgttttgctcatttatttacttatttatttaaacagttcagaaacgattgccagatgttggtatatcctactttctggatctgtgcttgtgaaaggctccatggtcttgcctccttgcaggtacgtttacatttgctatatggcaggcaaagttaatgttaaactattttgtataggatgtatattttctttcagtaagtgatacatcttttaaatgtctttgcttgttggcaccattggaaatacttggcaggaatcagttaatcttttgttatttctgagggtataatctgtaagcttacaccatgacatgatatcttcttcctgtctgaaaattagttttatggggctgggcacggtggctcacacctgtaatcccagcactttgggagactgatgcgggcggatcacctgaggtcgggagttcgagactagtctgaccaatgtggagaaaccccgtctctattaaaatacaaaattagctaggtgtggtggcgcatacctgtaattccagctactcagaaggctgaggcaggagactcgcttgaacctgggaggtggaggttgccgtgagctgagaccacgccattacactccagcctgggcaacaagagcgaaactccatctccaaagaaaaaaaaattagttttatgtacgatttgatctgatatatctaattggtttttgattcattgctgttattgggtgtagagaggtgatataatagttaagaaattggtttttggagtaaatcaactagattaaaattctgattccatcactagttatgtgactttggacaaattttagttttcttggctgacaaatgggaataataatggtacctacttaagtattgtcatgaggtgttaggaaactactacaaatgttctcaacagaagtctataagggttcacactctggagccagacttcatgagttcatatctgctctactgtttcttgggcagattacttaatttctttgtgccttactttgctcatttgtaaaatgagcataataatacaacctctttcatagcataagctagttctgagaaataaatgacttactctacataaagctcttagaacagtgcctggctgttagaagtaattgttaattattttaactattaggtaaaagagaagggtggtagaaagaaggtcagttgtggaattctgttagtaattattaagattttagggcctcaacgtatgctttagtgacataaaaatgtaattttttgtgacttttttcccaaaatgttgagaagaaatttctaggcttttaaagtaagacttccaattgtagttaatttagtggcataactatttaacataaatatcaggatatgggacatctcaatttaagtatcattttagaagtcatgccttgactcctgaaactttacatcattggcctttggttaaatgaaatgtgctaattgaccagttgaataacacatatagttgactgtatttataaatatatagtagttcttggctttttttgagctttttggccattgttccttttccctgtatttgtgaaactcacattaatgaatttgtattgttagtccctgagaactgaatatgctggattgatattgcctatggttatattttaagattattagtatttttctgttgaacactcctgctgttctgaatggtcaagatctttgttatgaggacttttaatagcccttaatcaactgcaataattcactactagtttgtgatcaagacaatgaagtttatctttttaagtaaataatcagaatgtttgagattttagaaaaatcatggtatgcatgaatgtaatcataaacttcacaggaaacatgattatggaagtttaatctttattctaaagaataatactgattagggaatttatcttttgtgtgaaagatttataataggctattgtaggttcatttttaggatttgtgagttactataacaaataaactacctggaataatgcttagcatatattaagcatcaagtaatttttggcttcttcagtcagaatacagaaaccataccgtaattggaacaagtgaagtttgatttttttattattatgattttttaaatttgagacagagtcgctgttgcccaggctggagggcagtggcatgatcttggctcactgcaacctgcgccttctgggttcaagcaattctgccttagccttccgaatagctgggattacaggtgtgtgccaccacacccagctaatttttgtatttttagtaaagacagggtttcaccatgttggctagactggtctcaggctcctgacctcaagtgatctgcccgccttgggcattacagtgctgtgattacagacatgagccactgtacctggcctgagcaggtaaagtttaattttaaaattaaactagttcaagggattagctactaagaaggataaagcagaataccctacagctgagggcgagttcccaaagacaaaacaaacttgaaagggagacagaccccttcctcacgactagagttgagacttggttgaagaatgttagttgcagcccaataaatagcagagacattcactgggttgctctgggacagagctggtccacagttgtctggtcaaggctggcaggaaggggaagggaactgctgaccaggagtggcacttaggagaccccccttaccaggatgcagatggcccctgaagctggggacaggaaacagaagccctccaattgcagaggaaagactttcttactgcagtgttactctagcaccctctgctgacaaaactgtaacattttcagctagcaaaggagaacatttacacaattctcatccttatcacaaagtatggcaataaagggtagatttgaagctgagagccagtatgtttggagaggcagtaaataactgtcacagtccactcccctggctgctcagcttccttatgaatgcttctaaacacacttgaaattccattcaacaatctgtgtctacgtaacaagacaaaactatcctttatacaaatggagttcttaccctctcccccaaataaggagacacacaacaacaatcattgctagctatatttgtatgtaatctgtcatagtgcctctgaatattctgttaactaaagactaccttataaagtttaccttcaatatcttatactatatatatagtaagcaaagagaaaatgcaaaaagctacttactacagtctttgtttctataatgggacacaaggctatagttcatatctctgtctttcactacccattcagtatttcttgccttaactaaaacttcagctgttctgtgtcctttactttgtgattggaacaaaactttaattttgatgtgtcttcaactatcctgcctttttcttagttgctgtagtttttcattaacctttttttttttaagacagagtctcactctgtcacccaggttggaatgcagtgatgtgatcccagtacactgcaatctctgcctcccgggttctggcaattctcctgtctcagtctcccaagtagctgggattacaggcatgcaccaccatgcccggctaatttttatactttttgtggagacagggtaccatgttggccaggctggtctcaaactcttgacctcaagtgatctgcctcccttggcctcccagagtgctaggattacaggtgtgagccacctcgcctggctgttttccattaatctttattgtttttgttgttgttgttgttgttttttaagacggagtctcactctgttgccaaggctggagtgcggtggctcagtctcggctcacctcaacctctgcctcccaggttcaagtgatccctctgcttcagcatcccaagtagctaggactgtaggtgtgcaccaccacacctggctaatttttgtattcttagtagagatgaggtttcaccatgttggccaggctggtctcgacctcttgacctcaagtgatccacctgcgttggcctcccaaagtgctgggattacagtgtgagccaccctacagtgtgagccaccgcacctggccccattaatctttaatagtgggcatggcaatactaacaggagcataagagaatggcctaagttccagatgtagtctttcttgcctacattttgtgcagtaacccatttttcctctgctaattggaatcagtcacgtgggccagtagactaacctcttttgctgcctgttggtttaatgactaggtagaagtctctagttcagtggaaccattgttgtgtttactggtagaagcaatactcttttgtacactaagcctccaaaccagcagagcttagagttgttgggaggggaagcaaaaatagtgtgaatgagtttatgagaggaaaataaatctcaggacccccaaatcactaagtcaaagagaaaagtcaagctgggaacagcatccagcaaaactgcctcccattttattcctaaataagatagctacaaaaatttaaaaaaaaaaaaaagctacattgctccctcatgatttgtccataaggaaataccttgtggacctaagatctttactctaaacagactgagggagcaaacccagcaaggcctttccagatttttcttggcctatgtagcattccttccttccaggtagggggcaggacccctctggaatgagggttttcaagggagaaaggagagtaacatttctaggttttatggcttcctttggggaagaggagttctactttctatgactcaccttgggaaagaggtttctgttactcactttgagggagaaagaggggcaagagaaggtcagagactttgcctttgagtcgtttcaatatcctttaaagaactcaccgtgccaaagcaccatattttggagtattgttttctgagttccaacaactctctagttttagctcttttattgagaaatataatatggggaaaagtgcagataacataaatctacatgttagtgagttactatacattgaatgtttgtctaatcactacccatatcaagaaattgaacattgtcattacctagaagcagcttccatgccttttcttaaatctactctcttacttttcctcaacaccagtttcctgaattttaatcagtcttgtatctctgaagagttttggcctgtggatatgtataccttagttgagggttattataagtaatgcagctgtgaacatttttgtatattagatgcacatgtggatacatttctgttgtatatacttaacaaggaattgttggctcacagtgttgtaggacttccttttagttcagctaagagccgggtcttgttacacagccatgaaatactaggctcacagacactttgaaggatgagaataatggaatctattgggcaaaaaggaaaaaggggaaacaagaattctctgcaaaaccaatttctgctagtatgcttcccacctggcagattgaatcccaggtaccatgcaggaagaggaggggccaggctcttcctcacagcaaagggcacagacttctgtggctccacccctgtgtgtgcttctcccagtgtgcaggccagttagaatttttctgggaacccctttacacttgactgtctcaacagggtgtgcctacattaagctttgttaattccaagttgcattccaaattgatgcactaatttacacacccaccagtggtgtgtgagagttcccattgttccacattctaaccaacacttagtaatacaagtctttttactttaaagtttttggctgcttaatttcagtcattcttttcaattttatagttttgatttgcattttaatgactgccgatgaatacattttcattagaatgactttttttttttaagatagagtcttactttgtcacccaggctggagtgcagtggcacaattttggcccactgcaacctccacctcccaggttcaagcaattctcctgcctaagcctcccaagtagatgggaccacaggtgcgtgacaccacgcccaactaaattttgtatttttagtagagacagggtttcaccactgctggcctcaagtgatccacctgccttggcttcccaaagtgctgggattagaggcttgagcctccatacccagcctagaatgaccttttttgtaaagtgacttctcaggtctgttcctcattttcctaataagttgtctttttgtttttgagatgtagaaattttttatatattctgaataagaaaccttgcttggttatttttgttggaaatacttttccccactctgtcttattcattgtcgtattcattctgttagtaacgtctttggatgaacatgagctcttaattctaatgtagaaaaatttgtctttcctgtttctgaggttgtgaaccccaaaaatctgagacaggtcttagttcatttagaaagtttattttgccaaggctgaggacgtgtgcctgtgacacagcctcaggaggtcctcatgacatgtgctcaaggtggtcagagcacaattttgttttatacgttttagggagacataagacctcaatcaacatatgtaagatcagcattggttcagtctggaaaggcaggactacttgaaacagagagggggcttccaggtcataggtagataagagacaaatggttgctttttttgtttgttttttggggacggagtttcgctcttgccgcccaggctggggtgcaatggcgcgatcttggctcactgcaccctccacctcatgggttcaagctattctcctgcctcagcctccccagtagctgggattacaggtgcccgccaccacacccagctaatttttatatttttagtagagacggggtttcaccatcttggccaggctagtctcgaactcgtgacctcaggtgatccatccacctcggcctcccaaaatgctgggattacaggtgtgagccactgtgcccagctggttgcatttttgtttttttttgagtttctgattagcccctccaaaggaggcaatcaggtatgcatttatctcagtgagcagaggggtgactttgaatagaatgggaggcagctttgccctaagcagtttccagcttgacttttccctttagcttagtgatttgggaggctcaagatactttgctttcacaaggccatggagatatatatgtatgtatgtatgtatgtatgtatgtatgtatgtatgtatgtatgtatagttttttttttttcttattttctagaacttttcttgttttcctttcacagttaaatctgtagtctacctggaattgagttttgggtatggtataatgttgcgtcgttttccatagggatacctagatgtccttttctcactcatttagtgccaccttttatgtaaatcaaatatccacatatgtgtgtgccagttttaattttcatgtttttgatgaataatgatgttgaacacttttccttatgcccttatgcttattggccattgctttctgttttttctttaataaagtatcccttaaattttgtgtgcctgttgttaaactcctgttattactgtaactgtccagtggattcttcctgcccacctgtacagacaaaaccaattcactgagaccatggcattgtaataaagagtttaattgacacaaggctggccacgccctgtgggagatggagttattactcaaattcatctctcccaaaatttggaggttaggattttttaaggatagtttggtgggccagggaatctggattctgggtgaagccacaggactggttagcaggaggtctgtgggtcctggtggccactgatgaatcatcagaaatgctaaaaacctgaaaagacatctcaataggccaatctcaaattctacaatagcactgttacttgcaggagtaattgagggagttgcaaatcttgtgacttttggaataatgactggtaatcatttatgtctacagcttagcagaattcagctcctcatccttgtaatctggtggtctttctttcattagctttacaaaagcagtttagttatcatttaaactataaatgtttcctaaagttagggtggccggggccaaggaatgattgagggcagtttagaggttaaaggaaagctgggtattggttagatcagatctctttcactgtcataattttcttatggttataactttgcagaggcagtttcattattattctataagaatctttctacatccaggatgcaagctgtctgttaaccattttatcccattaatttgacttgcatttttatttatttttaaaactttattgaagtataactgacatacactgaacagcacgatttatagtatacagtttgataagctttggcatatataaacacatgtaaaaccaccagtattacaaagataataagctctatcactagaaaaagtttcctcatgccactttgtaaactttccctctcatagttccctgctcccttccttggtcccaggccattactcatttttcatcaatgtagattagtttacatgttataaaatttttgtgtaaggtgaaacatacagtatgtactcttttctcattcagcttcttgcactcagtaaaattattttgaggtttatccgtgttatgtgtatcaatatttcatttcttcttaatgcagtgttctctcatggatgttaacaggaaaaccaaactctgtaaaatatcttaaagagatttattctgagccagtatgaataaccatggccaggggaaaagacaaattcaggaagccttgagtaagtggccctaaggtggttgggctacagtttggttttatatatttcagggaggcaggagttaagaggcaaagacacaaatcagtatgtggaagggatacaattagttcagcccaaaaaggcaggatgtcttgaagcagggggttatagattataggtggatccagagaaccttaattggttaaaggagtaaggctctgtcgaaaatttggaatcagcagaaaggaatgtttaagttaagaatgctatgtccaagtcagttacaataaaatgacctgttcagtgacattgttggtctgcaggtgtgacttaatccttgccttgcatggccttaggtcttatttataatttggcatcttattgccacaaagggtctgttttgtcagtcttatgatctctgttttaaaaaacaattaatactcataagttgtgtctaaacttcacaatggaggggatataacaaggcatgtctgacctcccttcccatcatggctgggaactcagttttcaaggtttctctggggtgcccctggccaagagggggtccatttagtcgattggggtttaggattttattgttagtttatatggatgttccactatttgtttagcattcaactgctgatggacatttgagttgttgactgttattgactattttgcaaagaatgttgttatggacatttgtgtacaaggtatatggtcatatactttcatctctctgcataatatgtaggagtagatggctagattttgtacgtgtttatgtgaatacatactttcatatattttgaaaaatacctagcaataagttatatggtcgatgcatgtttaacctttaagaaagtgccttactcttctccaaagctgtatcattttatattctcaccggcagtctatgagaattcatatcttttatgaagtgtctctgagcctttgacccatttttgataataaaattcttattttgtgcttcaaaagttctgtatgtgcttcaaaagttcttgtatgctatatgtaagtcctttaacagggatataatttgcaaatattttctccctatttgtgcattgtattttccctcttaattgtgtttcaaagagcagaagtacttaattttgatgttaagtttatcatttttttccctgaatggactatgttttgggggtcatatgtaaaatctgctattaacccaaggttgcaaataattttcttaatttttttttctggaagttttacagttttagcttttactatgatctatttaggtgtgtgatctatttaaaccaatttttgtatatgatatgaggtgtggatctaattttatctttttgcctgtgcatcctcaattgttccagcaccatttgttgatgaaaatattttttctcttctggattgcctttgcacctttattagaatttaattgacagtgtatttgtgggtatatttcccaactttttgtttcacttatttttctatcttgataccataccacattatcctgattactgtagctttataataaatcatgaaatcaggtggtatgtgttacctgcatccatataagagaccatctgagcaggcttagtgtgagcaacaaggctatttattcacttggatgcaggtaggctgagtctgggaaaggagtcagtgaatggtggtgggattatcattggttcttataggtttgggataggtggtggagttaggagcaattttttgccggcaggggatggatattacaaagtacattctcaagggctgggaggatgttacaaaatacattcacaagggtgaggaggatgttacaaagtaacatactttcacaagggcagggagggtgtattgtcacaagggttggtggggaggaatgttacaaagtacattcacaagggcagggaggaatgttaacaaagtacatttgcaaggatggggaatatcaccaagtacattatcacaaggactgggggaatgtcaccatgacttgaccatggtgtgcccagctcagaggaccttacattcctgtctttttatgttaataatgaagaaataaaatgaaaaagagtagtgaaaacttggggtgaaaattttgggggcggtatggaggggtgatgggtgaggtttctcagggctgctttgagctggattaggggcggcacgggaacctaagtgggagagattagactgaagtaagatgttggggtaaggggtgatattgtagagttaaaagcagcatttgttgtgtagagtgattagtgatagcctggatgcagtttcgtaggaattgagagattaatcggaagacccaaggcctgagtaagaagagaaggaggaagataggtattagaggactaacaattggaagaagccaggatactcagttagagagtagccaggtgggtccagtgtaattagttgcctgattagtgagtttttgagctctgtctttgagttttttgatgttatataccaagccagattaatttaagtaaaaacaacacttttcattaagaaatatacagagtcctcctttttcagcagtgagtaaatcaaggcctcggcggttctagaggacagctgcggctaaagagtcaacctgagcttggaggacagataaagtttgtgatatgtctgtaatgctagcagagaagtcattggagaggctgcggaatgttgtgacagaggttgagatgcctgctattccagttccaagtctggtagtggaggcagaaagtcctagatccacaagtaaagggattactgggatgactctttttgtcgtgttggtgtcatgagggagacaggcagttgttcattcccatctgcaagctggattttgggggtaaggaagactagagtacatgtgcccttccagttggcgggtaggcacatgtgggtggaagaggcacataaaaagaagagaccttgtgtcagtcagaactggaaatgtaaagtgaaaaggtgagagggtgtactgcaagaggagtcctgcaccccaaatcctagagatccagcaagggcagcagccattagaggttgtaatgggaactgatgttgcaactgcgtagagggagaggttctgttctcatggtgtatgagaaaacacatagtgtctatgaataacctttcactgctattcaccgtgagaggtgacaacgtgctggcggccctctctcgctctcaccgcctcctcggcatctgctctggccacgcttgaggagcccttcagcccgccgctgcactgtgggagcccctctcagggctggctgaggctggagccagcttcctctgcttgtagggagttgtggagggagaggggtgggcaggaacaggggctgcgctcagcgctcgtgcggccagcacaagttccgggtgggcgtgggcttggtgggccccacactcggagtgaccggctggtgctgccggccctgggcagtaaggggcttaacacccgtgccggcagctgtggaggaggcgctggttcccccagcactgccggcctgcccatgccacgctcgaattctcaccaggcctcagctgcctctccatggggcagagctggggacctgcagcccgccatgcccgagccccccccacagtgggctcccacgcggcccgagcctccccaatgggtgccaccccctgctctgcggcgcctggtcccatcgaccacccaagggctgaggagtgcaggcgcgcagcttgggactgacgagcagctctgcccgcagccctggtgctgggtccactaggcaaagccagctgggctcctgagtcgggtggggtcttggagaacttttatgtctagctacaggattgtaaatgtaccaatcagcactctgtgtctagctcagggattgtatatgcgccaatcagcactctgtatctagctaatctagtggggacgtggagaacttttatgtctagctaaaggattgtaaatgcaccattcagcactctgtgtctagctaaaggtttgtaaatgcaccagtcagtgctctgtgtctagctaatctagtggggacttggagaacttttgtttctagctaaaggattgtaaatgcaccagtcagcaccctgtgtctagctcaaggtttgtaaatgcaccaatcagtgctctgtgtctagctaatgtagtggggacttggagaactttggtgtctagctagaggattgtaaatgcaccagtcagcactctgtctagctcagggattgtaaacgcaccaatcagcaccctgtcaaaacggaccaatcagctctctgtaaaatggactaatcagctctctgtaaaatggaccaatcagcaggatgtgggtggggccagataagggaataaaagcaggctgtgccagccagcaggcaacctgctcctgtccccttccacactgtggaaactttgttcttttgctttttgcaataaatcttgctgctgctcactctttgggtccatactgcctttatgagctttaacattcaccgggaaggtctgcagcttcactcctgaggccagcaagaccatgaacccaccaggaggaatgaacaactccagacgggaggagcgaacaactccagaggtgccgccttaagagctgtaacactcaccgcgaaggcctgcagcttcactcctgaagccagcgagaccacgaacccgccagaagaaagaaactccaaacacgtccgaacatcagaaggaacaaactctggacacaccacctttaagaactgtaacactcactacgagggtccgcggcttcattcttgaagttagtgagaccaagaacccaccaatttcggacacaatggggctggatataagcaagcaagaggaggtgctgggcagagagtcagatgagcagggggagcaaagccaaggattgagtgagatgcagagtaggtgtcttcttaaacaatagtgactgctaatgttttttagtttgtcaataatgatagagggcttatcagtaatgcgaagttggaatgctcccatctgtttgttaatgtgcgtgactgggttctggagataaagaataaaggaacatttggacggtggaagtttgcctaaagggattccagtaagctgttgttggaagatgcataaaggagtggcaacagggatagttgtttgtgtggttaggggtccaaatatggggggatggaattgacataaggagaaaggtgccataagtagatgcggagtagtgtggcagcttgttggtgtgaaatgtctggggagttctcaccaaatctgtctagaaagtaaagaagttcctcaggcaggtaaagatgggggctattaaaggaggtttggaggtgccgggagacaagagaggtagcccagtcagcctatagagtggggacatctgtgtaagagcaggaagaaagggaaacacatagccaacaattctttgctagagaaggattggaggcagtgaggagagagtgggtgcaattgatagtatgctggaggtaactagggagaggtagagagtgactggagaataggggcagggataagagtgagtagaaaagttaaaaaaaaggacttcatcaggatagaagaattggagtgtaccttgccactgaagatcttctatccactccaagagagagttaagggtggcggtttgaggaaaaaccagaagataatcagttacgatggttcggaggaaaagtgtaaaccggcagtgtaaacaagggcagggcatttacgagtagttgagaatggtgaataggagtataactagacagaagatagtagggatgacaagtttttggggtgcagtccaagtagtgggggtgactgcgtaaagccatgttgcaaaaagtagggtaaggacgaatagacctaataggatgaaaggatgtattaggctcataagggttattactgttcttcagaaatgcgagtgagtttaagggaagtaggggagagtacttgtgacttccaagaggaagaggagggatcaggctggctgtccaatggacacagctttattccagaatggtgaacccaatggggagggtcctgcaggcggacggcagttagggtactgtagatgactaagtagggtctggtccatcaagattatagagtttgagggatcagattcttaacaagaactgatcatccagctagggtgtcttcatatggctgggaatctggagtagacaagagaagattagcagcctggcgaatttcctgtctagcctgctggaggactggaagatagtcgcctagagggctggtgtctggcacgagattgaggcccaacaagaaggtacatccatataaaagttcaaatggactataccctgtagcttcttgaggacaggctctaattctaaggagggcaaatggtaaaagtacagtccagtcttttttaatttggaggctgagtttggtgaggtgtttttaaaagaccattagttctttctaccattcctgaagatttaggatggtagggggaatgaaggttccactggatgccgaaggcctgggagactgcttgagggacctgactaatgaaggccggtccgttatcggactgtatagaggtgggaaggtcaaactgaggaattatgtctgacaggaagaaatgactgcggtggccttctcagaccctgtgggcctctacccatccagtgaatgtatctacccagaccaaaaggtatcttagttttttgagtcggggcatatgggtaaagtcaatctgccagtcttgtgtgggggcagatcctcgagcttgatgtgtcggaaagggagggggcctgagatatccctgaggggtggtagagtagcagatggaaccctgagaaataatttccttgaggatggatttccatgatggaaaagaaatgagaggttctaagagatgggccattggcttgtaacccacatgaaaaaggtcatgaaagaatgataagatagaatgagcctgtgaggcaggaaggaggaattttccttgatccaagaaccatttgccttgagtaggaagggattgataagtaatagtttcagtgggagaataggtgggagtgataaatgagaaggaaaaaaactggtcgtgagggacagatgtgagaatactagctgctacttttgctgcattgtcagcataagcgttgcctcaagcagtgggatctggtgacctttgatgccccttgcggtgaatgactccggcttccttgggcagtagagcagccttaaggaggattcttattaaggaagcgttgatgatggaggacccttgtgtggtgagaaaacctctttctgcccatataacagcatggtgatgtaggatgtggaaagcatacttggaattagtgtagatattgacatgtagtccctttgcaagggtgagagcccgggttaaagcaataagtttggcacgttgagaggtagtggaagcgggcagggcaggaagcttcagtgacagatgtggaagacactacagcatagcctgcccttgccgatgactaacgattgggccttgaagaactaccatcagtaaaccaagcgcagtctggattaggaacaggaaagagggaaatatggggaaatggggagaatgccatatggattagagagatacagtcacgaggttcaggtttggtgctaggtataaggtgagaggccgggttgaagtctgtgccaggaataatggtaattgtaggaatttcaatgaacagtgagtacggttgaaggagtcgggcagaaagtatatgcttcaagtgtgaggagaaaaatagattttgaaagttatgagagttgtagagagtaagtggggaatggtttgtgatcttgagggcctctagaagtattgaagtggtggctgccactgcacgtagacatgagggccagcctagaactgtgaggttaagttatttggataggaagactacaggtcatgggcctgattcctgtgtaagagaactccgaccgcacagccttgtttttcagccatatgtaagaagaaggattgggatgaattagggagtgctaatgtgggagctgtttctagggctgtctttaaggaacaaaaagaagaatggggaaaggacttagggtctgtggggtcagtcaggtttccctttgtgagtttatatagtggtttagttaggatggcaaaacctggtatccaaaggcgaaagtgtgcaaccacgcctaggaaggaaaggagttgttgctttgtagaaggggttggggtttcggagattagctggacacagcagggagagcacttgtgttttgatgaaggactatgccaagatcggtaacggatggggaagaaatctgggctttagagggggatacgcgatacttctttgagaacagatgttgaaggagcaggaggatgtcctgttgggaagattcgtaagaggggctgcagaggagaaggtcgtccatatattgaataaggtgagaaacggatggaaagaaagtagatcatgagaaagagcttgactaaagtaatgggggctgtctctgaagccttggcagtacagtccaggtgggttgctgagattggtggctgtcagggtcaatccatgtgaaagtgaaaagaggttggaatgaggggtgcaaaggaatagtgaagaaagcatctttgaggtcgaggacagaataatgagttgtggagggaggtatggaggataggagagtgtatgggtttggcaccacaggctggataggtaagacaatttggttaataaagcgaagatcctgaaccaacctgtaagatttgtctggtttctggacaggtaggataggagaattgtaaggagaatttgtgagctttaaaaggccatgctgtaacaggtgagtgataacaggctttagtcctcttaaagcctgttgtgggatggggtactggcgttgagcggggtaagggtgattaggttttaatgggatggtaaggggtgcctgattggtcgccaaggagggagtagaggtatcccatacttttggattaaggtagggagggagacacgagaggaggattcaaaggaggccttgaatcgggtaaaagggcagcaatgaggtgtggctgtagtccaggaatagtcagggaaacagataatttagttaaaatgtctcggcctaataagggaactgggcaggtggggagaactaaaaaagagtgcataaaagaatgttgtccaagttggcaccagagttggggagttttaaggggtcttgaagcctggctgtcaatacccacaacagttatggaggcaaggaaaacaggcccttgaaaagaaggtaatgtggagtgggtagcccccgtattgattaaacagggaatggacttaccctccactgtaagagttacccgaagctcggcatccatgatggtccaggggtcttccaaggcgatcgggcagtgtcagtcttcagccgctaagccaagatctgggaaggagttggccaaggaacattgggtttgagctccaggagctttaggagcagcggcgatgtgaattggacaatctgacttccagtggggtcccgcacagatagggcacagcttagaaggaatcccgggctgcaggcattctgaggcccagtggccaggcttttggcatttgaagcaaggtccatgaggaggttttgatggagcccatgggagctgtggcttggatgttctgaaggttttgtatgctggagacatggttgtgggttgtctcacagtgaaggcaagtagctgtaatttagagatacgctgctgcttggtggcttcttctctgttattgaacaccttgaaggtgagattgtttaaatcctgttgtggggtttaagggccagaatccaacttttggaattttttcctaatgtcaggagtggattgggtgataaaatgcatattaaggataaggtggccttctggcccctctgggtctagggctgtaaagtgtctaagggtagctgctaagtgggccatgaactgggctgggttttcatctttaccgtgggtagtttcctttagcctgtcataattaacaactttgtatgctgcctttttgagccacttgactaggcaggagactgtgtaatcttgcctagctatacctggggagtccgtctggtattgccaatgggaatcctctcggggaactgccctggtgccctcttggaagcctggctcatgaagccggtgggtatctgcgtaggactgggctagaaagtaaactctttcttgttcatctgaggagagggtagaggtcaggacgacctctccatttaaatggagtgactccatttaagtcactccaggttagattgtaggactgagttagatattggaattcctgtatatgtttagtggagtctgatgagaaagaccctaaacgctggctgatttgggaaaggtctgatagagaaaaggggacacgtaccctgactatgccttcagctccagccacctctgtaagaggaaattgttgggcaggtaggggagagctaattgctaaacgaaactgtaagccagaccaggtgtgaggaggggaggtaatggaagggttatagagtgggggagcagaggctgccgaagaattgggacctgattcagcctggcaaggtgcggccaggggagaaggagagaggtcagagtggtcagtggaaaaggaggattcagaggactctgagcttggagcagagactgaaaggagcagatgggagagaaagaaggaaagtctgggatgagtcgcactgggagcagagactagggagggagcgaagtgtaaaaaatgcatggatgtaaggcacctcagaccatttgcgcaatttttgacaaaaattatctaggttttgtaagaagacaaatcgaaagtgccatttctctggccacttggaactattgtcgagtttgtattggggccaagtggtattacagaagaaaataagacatttaggttttaggtcaggtgttagttgaaggggttttaggtttttaagaacacaggctaagggggaagagggaggaatggatggcggaaggttgcccatagtggagaaggtaaatttaaggacgaaggtagagacatggagaaatggagatgggcagctaccaggcttccagtaggcgtccctgactgagtcttgggctgtaatgtgggtgagcagccaaagcaggcatgatcagccaaagcaggcatctccacagttgacctgccaccaagggaatgtgggtgaatgatcaaggcaggcgtccctgtggtgatcagacaccaagggaagatgtgtcttcccaagtcagtaaccgacgtcagagtttttaaatgctcagataaagtgtgtctcctttttgtctctacctggaagggagagaaactgaaattgaaaggagagagattgaagggaggcgagagaggttaggtagagagcgaaaaaaccgcttacccgagtgtgaagaaccgcttaccgatttgaaattggtgagatggtccttggactggctggtctgatgacccagggtcataggtggatctcctcacggagggagcgtgaggacaggggaccggtctcccgaaggagttcccctgtcctgggtgttcggcaccaaatgttacgcacgtccatataagtgaccacctgagcaggcttagtttgagcaacaaagctgtttattcacttgggttcaagtgggctgagtccaagaaaggagtcagtgaaaggtggtgggattatcataggttcttataggtttgagataggcggtggtgttaggagcaattttttgcaggcaggggatggatattacaaagtacattctcaagggctgggaggatgttacaaagtaacattcacaagggcggggaggaatgttacaaagtacattcacaagggtacattatcacaggctgggggcggtggtggcgggaatgtcacgatggcttgaccatggtgtggccagctcagaggacttaccagtatggatcctccaacttcgtaaaaattgttttggttatttgttttcatatgttctttgcagttccgtatgatttctagcatcagtttgttaattaaaaacaaaaacacctgctgaggttttgattgggaatgcactgaatctataaaccagtttagggagaagtgaacatcttaatagttgattcttttaaaccatgaatgaggtacatcactccatttatttaggtctttaatttctctcaatgatgttttgcagttttcagtgtagagatattgtatatgctgatcttacatcttgcagccttattaaatcacttattctaattgctgttttatatttttttagtatttttgtacgtaagtgatcttgtcatctgtgaataaacagcttcatttcttatttttgaataagaatttttgaattcagatcttattttgatctgaatgccttttatttctttttccttgttgtactaggggaaaactatagtacattgttgtgacagagtggagcaaacatccttgttgtcaatctattaataaaaagtagttgggggcggggcatggtggcttacacctgtaatcgcagcattttgggaggccaaggcgggtggatcacctgaagttgggagtttgagaccaacctggccaacgtggtgaaatcctggctctactaaaaatacaaaaattaacccggtgtggtggcatgtacccaagccacctacttgggaggctgaggcacgagaattgcttgaacctgggaggcggaggttgcagtgagtggagattgcgccactgcattccagcctggatgacagaaccagactccctctcaaaaaaaaaaaaaaaaaaaagtagttggggatgaagacgtggggagttggaagcgttcattcagtttttcaccaactgtaatcttagctctaaatttttcatagatgacctttatctggttgcccctctgtaatctctactttccacaccttcttcatcagacaaccactgtttggctttctggagagagagtattttacatatagagagagtattttacttaaaatttaattttctgctattttatgtaaatggaatatgttgtatagttttttaatctagtttttttcatttagcataatgtttttatagctcacccatgttttagcacatatcaattctagcatgtccattttttaaattgttgatactgcattttgtctatccattcagaagattttaaaaattgaaaattttagttttaatttggggctgtcacaaaaatgcttctatcaaaatttacataaaagtctttatatggccatgtgttttcacttctttattatagatatgcaggagtagaattgctgtgttatgtaagtacatgtttaacttcttgggaaaagaccaaattgtttataaaatgactgtaccattttacattctgaccaccacttggtattgacagtcttttatattatttgccattctggtgtatatttaacagtgtcttactgtgatgttaatttgtagttcagtagtgatgagtgatgtagggggtctttttatgtgcttactagacattcctgtatcttctttggtgaaatgtctattcagacattttctccatttttaaattgtactgtcttatcaaattgtaagaatgtatctattttggatccaagttctatgtcatatatgtagttttcatataatttctctcagtctctggcttttttttttttttttttttttttttttgagacagagtcttgctctgctccgcaggttggagtacagtggtgtgatctcagctcactgcaacctctgcctcccggggtcaagcaattctcctgcctcagcctcccaagtagctgggattgcaaatgcccactactacgcctggctaatttttctatttttagtagagatgggggttgcaccacgttggccaggctggcctcaaactcctgacctcaagtgatctgcccacctcagcctcccaaagtgctgggattacaggcgtgtgccaccgtgcccagccagtctgtgacttcttaatagtgtcttttgaagcataaaactttaatattgatgatatctactttaaggtttatttttgagaatagagcttttggtgtcatagctaagaaatcttcaacctcacgattatttcatcttacagttttttctaaaagttttaaaatttagttcttacattttggtctgtgatccattgtgagttaattttttgttttgtttgtatatatatatttttgcatatggatatttgcatattcattttacctagcatggtttattgaaaaggctgtttttttccccattgaattgccttggtacctttgttgaaaatcagttaaccataaatatgtgtgtttgttttctgtaccatttgttctgtctcctttaactatttttctgtcttggtaccaatcctgactgtcttgattattgtagctttattgtaacttcaaatccagtaagtcttacaactttgttcgtttttataatggctttggctattttaggtttttgtatattcatatacatttaaggatttgcttgtcaatttataccgtaaagcctgttggggttttgataggaaatgatttgaatctatagattaatttggggagaattgcagtcttaactatattgtgtttccagcctatgaacatggcttgcttctgcatatatttatcttttatttctttcagcaatattttgtatttttcagtgtataagtcttacacttttgttaaatcatttccaaatattttattcttcttaataggattatgaatggaattgtatcttaatttcattttcatattattcattgctagtatatagaaatacagttggtttttgcatattgatcttatatcctgtgaccttgatataatcttttattagatctagtagtttatatttgtagattccttagaattttctacatgcaggatcagtctactatgttaaacatagtttcatttctttctttccagtctgtatgcctttaatgtcttttcttgccttattgtactggtgagagtctccagtatggagtagattggaagtggtgagagtggaccacctttgcttgttcctgaagcatattgcaatcccacagattaaccatcaagaatataacaaaaatcagccaggtacagtgtggctcatgcctgtaataccagtggtttgagaggccaaggccagaggatcacttgaggccaggagtttgagatctgcttgtcaacatagggagacccctgtctctacaaaaaaacgtgtgtggtggtgtacacttgtagtctttgctactcaagaggctgaggcgagaggatagcttgagcccaggagttttaggctgcagtgagctatgatcatgccacttcactccaactcagcaacagaatgagaccctatctctaaaaaaaaaaataacaaaaataacatttaaaaaatcaacaaaggaattaaaatgggatactaaacaaaaatatttgacagaaatgatagtagtacaggaagaacagaggaacaaaacagatgagacatttaaaaaataggaaaatggaagacataatccagacaagttagtaatttcattacatgtgcatagtctaaatattccaatcaaaagagattatcaggttctgtgacaattcaaaatcctattatctgctgtatacaggaaacacactttagctgtaaaagcacaaataagttgaaaaggattgagagatataccaggcaaactatattcatgagagaactagagcctgagtcaaaatagattttaagacaagaaatattactagagaccagaagcaaaatttcgtagtgttaaaaggattaatacattaggaatacatagcaatttttattgtatatttaatagcagagcttcaaaatatatgaagtaaaaactgacagaattgaaaggattagtaggagttcaactattatagtttgtgatttcaaaagtctttcaataatagaaccactagactgaaaattagtaaaggtatagcttgaaaagtattaccaaccactttgatctgatatataatcttttttttcaagatttatgggtcattctccaggatagggcgtataatctagtaacataacacaagtctcattacattgaaaggaatgaaatcatttgaagtttgtccactgactacagtgcaattctgttataaatcaatatcagaaagaaataggagaacttagataacatttgtaaatgaataatagaccaaggaagacttcaagagaaattagaagaaaatattttgaacacagtggaagtgaacacacatcaaaatttatgggatgcagctaaagcagtactttcagggaaatttagatcatatttatgagaaaagaatggttttgatctagtcatcttaagaatgaaaagaacagagtatactcaaaagcaagctcaaggaaggttcaagtggaaatcaatgaaataaacacaagaaagataacagagaaacatcattgaaacaaaaagttggctctttcaaaagtttaacaaaacttgataaactttgagttagactgaccatgaaaaaaaagatacaaatttccagaatcaggcataaaagaggggacattaacatcctaaagaaattttaaatattacaaaggatttttttttttttttttgagacaagagttttgctcttgtcgcccaggctggagtgcaatggcatgatcttggctcactgcaaactccacttcccgggttcaagtgattctcctgcctcagcctcctgagtagctaagattacaggtgcataccaccacgcccagataaattttgtatttttagtagagacaggccaggctggtctcgaactcctgacctcaggtgatccacctgcctcggcttcccaaagtgctgggattataggtgtcagccaccgcgcccggcctacaaaggaaatttatgatcaacttgctatcaataaattgggcaaatcttgcaaagacatacattacaaaaaaaggctcaaaaaaaaaaaagaaaaagaaactttgagtacagagagaagtctagacccagataactttacagctgaatgttttcaaacataagaagcattattacatacattccaaaagactttgtattagggtaatggtagagaaaatgctttcagctcatttctgttagtccagtattactgctaccaatactaggcaaaaatcacaagaaaaaaaattccagattattattcctcatgaatatacatgcggaaattgttaacagaataacagaaaacagaatcctggtttatatttaaagtattttataccatgatcaagttgggattatcccaggaatggaaggttggtttggcatttgtaagtcagttaacacagtatactttattaataaaataataggcaaaaaccacatgatcctttcaataaatgcagaaaaagcttctgggaaaaatctaaaactcattcagcataaagtatttgaacaaactagacatacagaagggaactttctgatatagggaatgtacaaaaattttattattatattttagttttaatttttaaatttgtatccctgatccttttttttttttctttctttattgagacagagtctcattctgtcacccaggctggagtgcagtggcatgctcatggctcactgcagcctggacctcccaggcacaagtgatcctcctgcctcaaccttccgagtaactgggactacaggcatgcaccatcatgcctggctgatttttgtgtttttttgtagagacgaggttttgccatgttggacaggctggtcttgaactcctgagctcaagctatttgctagcctctgcctcccaaagtgctgggattacaggcgtgagccactatacctggttctgatccacttataattaatttttgtttatggtgttatattaagagctccatcccccactgcctttgtttcttctgtattgatatctggttgtttcccaccatttataggaaagattatctttctccattgaattcttttggtacctttgccaaaaatcagttgaacatgtatttatgggtctccttttgttctctctatcctgttttattgatctataagttgatcaaataccacattgtcttgagtattctagctttaatagtgtgccagaatctgatattataaatatttcaactttgttcttattttccaaagttgttttagctattttaggctctttacaattccatgtaaattttagggtcattatgtcagtcctccaaggtgactttctgggatttttattgtgattgtattgaatctgtagaacacttcggagagaattgccattttaatccataaacaagatatatctctttttaatcaggtcttcaatttttctcagcaatgtttcatagtttttaaatttgtaactttgtagaagtcttgtgtgtattttgataaatgtatcatttttattctatttttaatggagtcaaaagattttattttctgattgttgctaatatacaataaaacaattgatttttgggtattgcgcttttattattcaatcttgctaaattaatatatttctgaagcttttttgtaggattcactttatatacagtgaattcactttatataaacagtagttctaggaactcaaatagttgagagtttatattagtgcccccagctaataaattcagaaaggatgatcaaaatataaaatacgtattttaatagccctaataatgctttcagtctacgtactgataaaaaaaatgctaaaactaatagatggaaaattgagaggaaactttataaatggtgggtcaagttgacactgtctgaagctactcaccaattttaacattactgataaatggaacaaacagaccttatgtgtctgcatatgtgatttgatagaacattgcattaggtcttttttatatctctctgttgtgttcgtatttatcgttactttctttaacatacaaaacacacatagcaatagctattataatattgttgtctgttgatttctatacttctgatagttctgggtctgtttttattggttgtttttttctcttggttatggattatattttcctgtttctttgcatgcctggtttgttgttgcttgtttctttattgatgtcatcatgaattttatgtcactgggttccagcttttgcatctctttaggtggtattgggttttgttctaacgtatagtctagctaattggaatctatttgattattctgagctttatcttttaaatgtatttgcgcaagttcagcactttagtgtgggactaatttattttgttactgaggaaatacattcctgaggaccctacctagtaccccatgtattatgtcgtctttcctctgtgactctttgttctcacatatccacagtactcactcaaagactcaagaggacctttcttcaaagcatatatgcacacaaatgctcatgcatactcttgtgcacaatgttgttctctctctccccgtatctctttgctgctctccctcttttcaggaacactgccttgcaaattctaagtatctttcccctgtcatccacaccccaaaacgcttattagcttttcaactcagcgaaattgtcaggctgtgttacgcttctcttgcctgtaggtggtaaaatggtgtattgcaagagtcatcttagttttttgtttcctccctcaggaattacagccctgccctgccttctttttggtgtcttgaaattgttgttttatatattttgttttgttttctgtttttgtcctcaggtgggagagtaaacccagtccctgttattccatcttgcatgaaagcaaacttttacagatttgcttttttaaatgtattaggtgatacaagaatttgggggaaacaaaagataaggatcttctgcttaagaaaaaacaagtgaggcctggtgcagtggctcacgcctgtaatcctagcactttgggaggccaaggtgggtggattgcttgagcccaggagttcaagaccagcatagtgaaaatgacaaaacccctgtctctacaaaaaatttaaaaaattcgccaggcatggtagtgcatgcctgtagtcccagctacttgggactgatatgggaagatcacctgagcccagggatgtcgaggctacagtgagccgtgattgcaccactgcactgcagcctgggtgatcacagagtgagatgctgtctcgaagaaaaaacataagtgattttttggttatgttcaaaagttattttgtttggattttgattagaattttgttattaactgttatttgtatagaaccttatactttgggaaattgacatttttaaatatttagccttcccataaaagtatagctatgttactttaagctttgtttctagcccatcaatgaagttgtataattttctttataaatgacttatttatttattagatgttttttggtattttgttttgtttgaatgattaatgttttttttccatttggttattttggagtaatatttatatgttttatttactaactgacactggcactaaattttcatatatgataatacttttggttgctttatcattattttgagtgagctctgtatatttcatatgtaagtcatttgtgtcttagtatagttgacagggcttttttttattcttcattaaaaaaaattcaggttatcttttaaaatggaaacctatctttttctctgtggttgctttctttttgatatgctgagaaatctttctgagaccaagaatataaaaatactgtcttttagtactggtccagctttagttttttccaaagagctgtgactccaacactttcttttaagaagtcatctttatatctaactacatttctttatatatagttggcacttcatatccgtgggtttcacatccattaattcaagcaactgctgatcctggaaaaaaaaatggatggttgcatctctactaagcatatatagacttgttttacttgtcattattccctaagcaataaagcataacaactatttatgtagcatttcccgtgtattaggtattattaaaaatctcaagttgatttaaagcatatggaaggatgcacataggttatatgcaaatgctacatcattttatgttaggcgcttgagcactggtagatttttgtatccttggggattctggaaccaatcccagttggataccaagagactactcaagtgtcaatattttttaagtttttttatttttagtatctgttgtcttaacactgctcccaaaagattataataatttacttttattaaattgcctaatcaggttatcacttttattagatttttactaagtgtatttttttctttgtgcaacgtatattgacagatgttagaaatttgagattagacagttatcttttataattaattttagggactagttaaaggcagaagtttaaaaagaattttcatatagtattgagatcagttatatctggacaattaagagaaaggtttttttttttctttcttttttagaaaatcttaacataaatattgtgacaggatcagaatttcttggataatatctcagggcttttttgttgtttgtttgttttcttttcctatattgatatattttattaataacctttgctaaagaaattgtttttctgtttttatagttttggtaagcagtttggaggaaaaagaggatgtgattgtcttgtattagagccttcagaaatgattgtggtaagaactttaaagaatgctgaattgtttttgatatgcttcagttttaactttaaatgtagtaggctttaaacacttaaggaggttttattactatgaccttttagagatttcatcaagtagcatcagaactatctaccaggtttatctatttctgtctcttcagactttttttgatcctcaagagagtgtgaaacatgatacacttacatataatttgcagatttggtattttttacccccttctaccagaaaattagaagttttaaaaggggaccatgagttttcaagtgattttttttttttttttttttttgagacagagtttcattcttggtgcccaggctggagtgcaatggtgcagtcttggctcactgcaacctccgcctcctaggtttaagcagttttcctgccctagcctcctgagtagctgggattacaggcacctggcaccattcccagctagtttttctattttttagcagccatgggggtttcaccatgttggccaggctggtctcgaactcctgacctcaggtgatccatctgccttggcctcccaaagtgctgagattacaggcgtgggtcactgcgcccagcctcaggtgatttcttctttcccattcaattttactttttcaataaactttgaattctatagtctgtgccctagactagagagaatgaagtagagaaaagtaaaaagacatacaattagatccaagtaagaaatggtgttagtattttcactttttaattatttaagataagtttttatttaagagtgtatttaaggaataattctttattttttcttaaaagagctaagtagttgatgtaactttagaatttttttttttaagtattagaagaatcaagaacacagcttgctttttacgttgttctaagatgacctgactagaaaacagcatataccgagtggactcattgtcctactaggatctcatgtagatgaccatgtcatctgattagatttgaactgtcaagaagagaaattgaattcttaatgaagcattttaatgtaagggctcaaaaccaaactacttttccatttcatggtgctatagtcagattgataccttcaaatagtttgttttctctttcttaaactggatcatctgtataaccatgaactcactatccctaattttatgtgagcaactggattttaagctcttacagggcaaagattatgtcttattccacttgtgtctccgagagtatcgcagagtactgcctgcatagtaagtattcagtgaatgtttcttgaattcaagttttttcaaggatggagtatgtattgtttcaaatttattttctttaagcactgaatatatgggattcctattagagcctcagaattctttctttttaatgtatgtattgaggaacatggcaagaaaactgcccaggcagtattgattttctgactttttagttgtattttgtatttctcatactatatgcaaaagaaatactgcttttacttcagtgttatacattctgttttagtgcttgttttacatactttatgtaatattttcatatgaggaggaagaaaaggagaaatcataggcatagctataaatgacattgttggtgcaattgatgaattcaaaatatgcactacagattggataatatcaaattccctgagtttgataaccatactgtggttctgtaagacaaagtccttattgttagcagttacatgttgacatattttggggtcaagaagcattatatctccaatttattcttcagtatttcagaaaaacaagtatataaaataaaaagtcacatcaagtatatgtatttatggctggtaatttttaaatttcaaaaatttaaatttattgatgattggtataattttaaatgctttatgagttataggagaaaacaatccaaaataggtgaaatttttcagaattgttaaaaatgcctggtcaaatggttttgtctatttgtacagatttgattaactccactggtgattggaagtgtctgttactgaacacattcttgatcacctgataagttagtcatcttaatctgacacattgtaaagtaatctccttgttttaacttttttttttcttttttttttttctttttttcttaaagaaaaggggcttaccgagagtagagtgtgcggtggtgcgatagctcagcgcagccttggactcctgggctcaagtgagcctctctcctcagtctctcaagtagctgggactacagatgcaccccaccatacccagctaatttgttgttgttgttgttgttattgtttttgtagagacagccttgctatgtttcacaggctgatctcgaactcttgacctcaaacaatcctcccacctcaacctcccaagtgttggacttacaggtgtgagccaccatgcctggcccaaagtatacttttaggcaagaagcattatttaatgtaagaatggtactgtatagtgataaaaggttaattgtatcaaggttacacaatcctgaagctttacatgccttcaaaatacataaaacaaaaattgtccttagtaaaatcagaactagacaaacccacaatcacagtgggagatttttatttttatttttatttttattttcattttgtgatggagttttgctctctcgtctaggctggggtgcagtggcataatctcagctcactgcaacctctgtctcccagacttaagtgattctcctgcctcagcctcccaggtagctgggattacaggtgtgcgccaccacgtgcagctaatttttgtatttttagtagagacagtgttttgccatgttggccaggctggttttgaactcctgacctgaggtgatcctcttgcctcggcctcccaaagcgctgggattaacaggtgtgagccgctttgcctggccaggagattttaatatacctctaaagtaactgacaaaacaaccaccatgagtcagtaaggatattgaggatttgaacctcatcatgtacacattttacctaagagacataacagggaacactacacttatcaacaacagagtacgcctacttttcaagtgcacatggaatgttttttaaatttgaccacatgctgggacataaagcaagtctcaaaatttcagtatttaaaattttatagtttctgaccaccatgaaattaatttaaaaaccaattataaaaacacagctagaaaaaaaaatacaacttctgaaattcaggcgtatgctctaaatcgcttgtcaaagaagaattacttagaaaattagaaaatattttaaatgaataaatatgacctattaaaatgtgtagaattcagcgtaagcctttcttgttgtgaaatttaagccctagtgctataagagcaaaggctgacagtaaagtattcatgtcaggaaattaaagagcagcatatgaatagtaatcacaagccaagaaatagtaaagatcaatataaaaataaatatcagtggcataaaagcaaacttagaataatgaggattgacaaaggacaaggttgagtctcagaaaagactaagaaaattgataaacccgtcaaagataatcaaaaataaaacatgtcatacaatcagtatcaggaaggaaaaaggattcactactacgatctagcaaacatttttaaaatgctaataagggagatggtatggaaagcttaaagcaagtaagtttgaagttttagtcaaattccttggaaaaaaaaaaaaaaaaccaaactggcatatacacacacaaacagaagatctgcacaagccaatatctagaaaagaaagtgaatctgtaattataaaccttttcatttagaaattcagacccatgtggcttcactggtaaatttttccaaacatttaaagaagaaataatacttagcatctaataggaaatagaaaaactttaacttctttgccttattttatgagcctattttaatttttataacagcctaacaagggcattatacaaaagcagtattataggttagtatttttaaatgaaaataaatgtaaaaatcttaacattttaggtagtccaatttcagtaatacatacagaggataaaacaacatgactacattgaatttagttccagaatcacaaattgatttagcatttgaatgtgtgattcactacattgatataattaaagaaaaaaatcaggtaatcatttctatggatgcagaaaaagctcttgataatcagaacccgttcatgattttaaaagcttttagcaagctaggaagggaatgaaacttttataacctaattgttacctgcagaaaccctataataaacattgaaaactttctcccaacatttgggaatatatggagaaagctcaccataccaaaactattggctaggagatgcatttaggcaggggaaaaaagagattggaaaaaaatataaaactgtgatttacagatgacatgatttgtatgtagaaaaccccaaattacctaagtgtgaacttttgaaatttatgtcatttcaacaaggtcgttggatactcgttcatacataaaaatcaattgtatttttccttacaagcaagtagaaaattgaattttataaacgtaccatttataaacatcaaaaccatctatatacatcagattaaatctgaaaaaagttgtaggagacctttacacagaaaaccttaaaaagttgtttttagatcttctttaaatcagttgagacaatatttttaagatacaaattatctcaaaatttgtctaaaatttagtgcagtccccatcataatcccaggatattttaaaaatggggataaaggaattgatctgtaacatatgtcacataagggaagaagaatatatttacaaaaactgtatgagaagtacttaagctgggtgttgtgacacacgtctgcagtcccaattattcctgtctgtgaatagccactgcactccagcctgggcaacatagactcccgtctataaaaccaacaaacaaaacacttaagattaaacttaacaaatgtgcagaaataatgtgtttaaatacccctgaaataaaaaaattaaacttgaacaaaaaaagagataccatgttcttaggtatggagttaccatagtaaggatattactttttgttagtttaccttatgaatataatgaaatcccagtgaaatatgccatcaagtatagtgtttattttgtgttttgcattttgtgccatttaaaagaataaaaaaagcaaggagaactagaagaaacctgagaaagaagagcaattttaggggagccatgtaaatctttttatgtactaaaagcaattcaaaaggagaaaaaatttactcttccccccaaaaaacaaaataagtgattttaatatatgtaaaattttggtataattccatgaagaattattatttctggtgactttaagacacagtattttaactgtacattcctaatgtagtatgtctcattgttggtgttactaggagccagttgtctcattgttggtgttactagtggtcttttcttcttcttattattatttttgagacagagtcttgatctgttgcccaggctggagtgcagtggcatgatctcggctcactgcaacctcagcctcccgagtagctgagattacaggcacacaccaccactcccagctaatttttgtatttttagtagagatgagtttcaccatgttggtcaggctagcctcaaactcctgacctcaggtgatccacccacctcggcctcccgaagtgctgggattacaggcgtgagccactgagcccagcctactagtggtctttttacagttttccatacagtcctgcactgctggttatgactgatcacatgtatgacaatggttccataaaattataatactgtatttttactgtaccttttctgtgtttcgatacacagatacttaacattgtgttataattgcctatggtgttcagtacagtaacatgctttacaggttggtagcttacgaccaataggccatactatatagcctagataagtagtaggctatactgtctatgtgtaagtgcactctatgatgttcacacaatgacgaaattgcctaacaactagtttctcagaacgtatccttatcgttaagtgcacatggctgtatatgtgtgtatatagacgcacgttatatgtaactaattataatttaacataacacatatacataaatctatacatatataaatattagtatccaagatgatgtaaccaggatgttagtggtaatgttgattttgttaatttaaagcaattatatatgtataggtaatatttatgtgtatattatgaaaaattctgtatgatacatttaattggaaataattgaaatttataattatagttaatataactaatagatgcataaataaatgtcattagtaatcaagatttttattttagcataagagttgtgtaaaattaaagatgttaagaaaaactccagtctaaaatgtcagtaggaaatgtcagcattgacacatgactatttttttcttaaaaatatttaccaaattatttcaccttaagaaaaaaaaatgtgtttcctagggttgttcattgcaaaagtttagaagcagcgatatccaagtagttaaagcattcctagtggttatagagctcagattttgatgataatgagtaggtaccatttcccctctaaaaggataacaaaccttcgttaagttaatgatttatagcagatgtggataccaagaaatttattagattgggatttccttcactaggaagcagagaaatatttaaaattattgggcttctctcaaaaatatcaggattctgtgaaccttaatacttggggtctgtttcttctttttctatatttgacatgagattcttttttacctggaaagacttttctatttgtattcattgtgattgctgataggtttgaatttactttcaccacattatgtgctttttatttgttcttgttttttcccctcttttttttattttccctcctttattttaagttcttttttccttcctctcctccccaccatattcttgtagaaatggtgtttggtctcttcttttagtgctaattctgactatttttaaattcctacttaggccaggcacagtggctccctcctgtaatcccagcacttcgggaggccaaggcgggtggatcacctgagatcaggagtgcgagaccagcctggccaacatggtgaaaccccgtctctactgaaaatacaaaaattagccaggtgtggtaggcgcctctaatcccagctacttgggaggctgaggctggagaatcacttgaacccgggaggtggaggttgcagcgagccaagattgtgccactgcactccagcctgggcaacagggtgagattatgtctcaaaaaaagaaaacctatttaaaaacacctgaggctaataagtagctaaactgataagaatttaatgctagtatccagatgtaattcctattgtccagtattttagctttatgtattctgtaaatcattatttattcctatttaaccacgtatttaatattttttgcttttagttctttcttatatatgagaccgtcctaatagtaacacttgtattatgtttaaagtacacccattaaaaattctttcctgaagatcttctgttaagtctctcaggtattttttcttttttgtctgaaaataactttatttttcttcattcttggaggattgttttgccattaatacaactttaggaggagaattatttttattaacacaattaatacattctatttttttacattcatcgtattttgaggagtcagacattaattgccttcctgatctcttttttctttctggctgcattaaaagtcttctgtttatattttctctgtaatttggtatcgtagtttttcattatcctcttttggattttttggactgctttgggcatcaaaaattctttttttccttaaatattgtcttgttctatcatcttcttgacattttttttttcaacctttcctcttagctttcttattttttacctcttcatgatgactttgtgctgtatgttgagtaagtcttctggatttatcttcccagtttactaactccctttttagttgcatcttaatataccattcagttccttcatttttcttatttaactcttttcctctttctctttggtaattttattgtcctatgtttaatttccttgatcttaactcagttgtgttgagtctgccaatgagcatgtcagagacattcctcatctctattactacgtcttttgtttctaacattttcatttttattttatatttttattttgtctgctaaaattatcaatctgtgtgtgttgtctataccttttccagtgaacctataacatgtttaatcatagttgattgaagttctctctctggtagttccagcatctggatccactctaattcttgtagactgctctgttgattgctttgtctcttggtttttgttttttgttttgttttacctttccttttttatgtgagttataattttggatttaatgttgggcattaggttatagggctatagcttttaagcctagagatgaacacatttctactggagttgagctaggtttggattctcttgctgttatggtgcaccagtggtttcaaatttgtttagtgttactttgtccttgagtttgctggaagattattctcagtgttcctgctccactcagttttaggccttctctgtgctcttgtgcttcagcagggtctcttcatgttctcatctctcctccaaatgtagattgctattggttgttcctcactgtttgctagcctggcagttgggaggagggcacttagggctttcttgtcctggtcaagcttcaactgcttggttactgtttatcatctctggctcattttcaaattttcttttgtttgaaagtttttaaattttgactttctattctctaatactttcagtatattggagtatttgcaggtgtcattccacttttttaggggctcatttttaattatgtcttgcttcttacatgatgttgatgtagttgggatttttttatatttgtctatgagttcatatgtcttggaactttaggtacagtaatactttgaggtttatgttaaagttgcatttttgttggcctggtgtggtggctcacgcctgtaatgtgagcactttgagaggctgaggcaggtggatcacctgagatcaggagttcgagatcagcctggccaacatggtgaaaccccatctctactaaaaataccaaaagtagccaggcgtggtggtgcatgcctgtaatcccagctacttgggaggctgaggcaggagaatcacttgaacctgggaggtgaaggttgcagtgggccaagattgcgccattgcactccagcctgggtgacacaagaaaaacgccatctcaaaaaaaaaaaaaaaagttgcatttttgtaaggaagttttgcatttgttatttctgctattgtttattaatagtgctgaatctcttttagtttacttgcatgcttgaggtattgtgaattcaaactacagatctggatgaaggatgccttgtggttttgaattctcaggggaaggcaatttttgttcagttgctccccctcctcttatcccagtgccaggcaagttttcttcctgtccccttctgcttgtatcttgcttacccttgtaatgagggtgtagctgtttgggatgagctttatgagtaggtttctattagattcctcaactttggtagagtctcttgtttcatctcttgtctatttcactccctacaaacatcagagtgaaaaatcttttcttcagagtttgacagaaactgtctggtagatcaaggactttattggtttcccaagttcaagtattcttgctttcacatcattcttggcatttggattctgtaccttttgtgccatttcagttgtgtttgtggttttattttttttaaatcttacattgtttttaatgcaggctttaatgttttaaataccacaattcagttatattcagtgggaactttgttaagggcatttaactctttatattcctggaataaaaatcatgattagatttttctttgcatttggtacttttcccaagattttgaaacttagaaagccttttcttaaatttattttacttccatttttactctgtaaagcctttattgtttaaatctctgcattgctcaataagtggtagatagtaaaagacctaagaatcatgtaatattggacttttgtctaaagtagataatctcttttatcttttgggatagagcaatatgaagttggactttttagtcacacttgggttttgagtcctgattcacctacttgtgtgaattaacttttttttttttttttttgagatggagtctcactctgtcgcccagactagagtgcagtgacacgatctctgctcactgcaacctctgccgcccggtttgaagtagttcttctgcctcagcctcccgagtagctgggattacagcgcctgccaccgcgcctggctaatttttgtagtttttagtagagatggggtttcgccatcttggccaggctggtcttgaactcctgacctcatgattcacccgcctcagcctcccaaagtgctgggattacaggcgtgagccaccctgcccagcctgtgaattaacttttatgagacactgtaccatctattacaataggaaaagtagctatgtaatagggttattgtgaaccttaaatgagataagctgcagtttctggtatatggccttgtgtataccttttgaggactttatacataattccaaggacctaatatatttgaggcaaaagggaaaatttaattaaacacctattttggcaaatgtcttgaatattaggtgaacaaagatgaatataatattacataatacggttcctgccttagagaacttgttatcttattagtgaggttggtatacttagtgctatagaaggagtaatacttttctggagtagaggagggattggttgaactaggtcataagatgtaagtaggaggccaatatgctggcaaagagggaatgggcttttagccagaagtgacagctgcatatgtaaaggtctgaaggcagtagagaacatgtcccatttttgagaagtctaggtgtgtatacacaataagccaatcgaggtctgaggagaggaatgtctttggtaattatggaagagatggcctttgagataggtagtgtctaaatgatagcatgtgaagacagaatgggtatgataacacaaattgaagaaataagttacttggcagattataagttatttatacataggggcacatgaatagtcacattgagttggctgctacttattcttgaattcacacctgaacaaagcagattagacatcaactcttagaaatcattaggaaattttgtgtatctaattagaatttttgtgggaaagcaaataagggagcagcttttccaggattgtacatgtaagataaggtgataaaagtattttggggatggagtttataatggctttgaatatcaaatgtaagagtttaaaatttatttggtgtaaacattagaggtccgttgtggcattttgaacaggaaacctgagtaatggtgattatctaggtgatttgtttgaccctgcaggatagaattggagaggaacatgcctaaagcagcaggatcacctattgctgtggtttgggactgaggtgattaagacttaaattaaggggaggtggtaatgggaatgaaagagcattatgggagagatttatagagaactgacaatctgagagagaattgaaccaaagatttggaagacaagcaggggtgctgagaatgttgatatgatacagtagtctcccacacccccatatctgcagtttcgctttccacatttttaggactgtcgtactgtggaaagagagaggagctaaatgatgagaacacatggacacatagaggggaacaacacacactggggcattttggtggagggtgggaggagggagaggatcaggaaaattaactaataggcactaggcttaatacctgagtgctaaaataatctgtataacaaatcccatgacacaagtttacctgcgtaataaacctgtgcttgtactgctgaacttaaaataaaagttaaaaaaaagagagagaccatattcacataacttttttttttttaagagacagggtcttgccgtgttgcccaggctggacgttaactcctgggctcaagtgatactctcgccccagcatccctggtagcagggactacaggcactcgccactgcgccccctcacccccacataacttttattgcagtatattattatattttattattaatctcttctgtgcctaatttataaattgaactttatcataggtatgtaaatacagaaaaatacatgacatatatagaatttggtactgtctgcagtttcaggcatctagtggggatcatggaatgtatccccctcagataagggggcaccactgtgtttgggtgggtgcctaggaaatttttggtaatatcaagaactctgacattagcagaaagagtagttatgggggaaaactaaaaccaccatttattatttattagatgtgagcttagttataaaggtagatttttagagcatatcaatatacctttataaaaatagttaatttaaaaaattatggtttgttctgtgattggacaggcagtgcagtcttgtatcagtggcataagctgttgagctagataggtctatattcctcctcaccttaaaaaaatttttttttttaattttttgagacagggtttttgtcctgtcgcccaggctggagtgcagttgtgcagtcatagctaacagcagctttgaactcctgggctcagttgatcctcccacctcagcctcctaagtagctggtactacaggtgcacaccaccatgcctggcttatttttttccccctgtagaaatggggtcttgctctgttgccaggttgccaactcacctttaataagtatcactgttgtgagactggaatgtcactaatatctttgggtttttctttgtctacaaagtagagacagtaatacctgcttacagggctgttgtgtgaactaactacttaatatatatgcatgctggcctattttaaactcctaacaaatgttaattttccattttattttcttacttagaagatgccagccttacttgtggctgttgtcatgcattaagttgaaaattaaagaatattgcataaagttttcttgttttactttttaacaattaactaaaaccataaccaggattgtttgctaagtaaaatatgtgtataatcaggcagtttgtaattagaggaactcaagttgtaattattgaatgtgtaggtgtagttaacagccttcatttctggtaagtgactttacttagaggatgtatgtttatgtgcacaagagagactgtttcctggacggaaactgtggtctccagatctttataataacatcacctctaatctttaactcatgagcgttgtgctatacagactgttttcttgaggcagtttcttgtaagaagtaaatgaagcttccttatgagtctgttaagactccatagattgtcaataatatggaaaaatttgatatttcatcaggaatatgaacatgtgtttcaggtagagaatgccaaagataatgaagatagtattctacaaagagaaattcctgccagacaatcccgaagaagatttcggaaaattaactataaaggagagcgccaaaccattactgatgatgtggaggttaacagctatctttctgtgagtatatttaggaacacttcatgaatcttccttaattttcatatctagtatctttaatttacatgtatctttggtaatatcaacatgctgggctctgtatgtgaaaatttggggcaggtaaatatataatctttttaaatgcttctgtttggttgaattggttaggaatgctcttaccagtgggagttctggttttgcttttttgttgttgtttaaatagtgaaaaaagttattaggctgggtgcagtgggtcatgcctgtaatatcagcactttgggagacctaggcgggcggatcacaaggtcaggagttcaagaccagcctggccaatatggtgaaacccccatctctactaaaaatacaaaaattagccaggtgtggtagtgcatgcctgtagtcacagttatttgggagactgaggcaggagaattgcttgaacccaggaggcagaggttgtagtgagccagtatcacaccactgcattccagcctggtcgacaagagcaaaactctgttgccaaaaaaaaaaaaaaaaagtaagctgtgtcttcaaaagtctttaattgtgaatagcttctttttagactgaaaagtagctgaatcaagaaataagggtaatctaaaaaaatcaggtgtatttttgaggggagaggtttcatagttaccagtttccaaagtactcacgatttctagaatattaaaacaattagtacagagcatttcctcttgtttgcatttgttaaaaataataataaaaaggatggttgaatatagtgaaattcccaaggatgtgtttagttttttcagttgtcataaacagatatttattcattccatgttaggtgttaggagtaagaaagattatttcgagagttgtttgtactggaataagtgttagaattaaggcagctctaatgtttgtcacatttgcctaattgcattgattcaatacaagaatatgaaatagtcctaaaatttatcatatccagagccacaacaaggtttatttcctgttctcactatttaacaatttctgtttttgtattgtaaatttcccatcactaattaaggtgacatattttgctttactgtgtaagtaatatgtgtctttttttgaaaaattagaaacagattgttcctattacacagttatataactatttgatgatattttgcaattcttggataaagcttttcaacatacagataaatctgtaaggtttttgctaactattgaaaacttaaatatgtaaatttttgttaacttttaaaaacaaatatataaactaaacatctttgaatgttgttaaatgtttttcccattattcctaatgactgcacagtactccattataataatatgctataatttattcagttcttgatatttgataagttacattctttccagttcttcattatttatttattttttttttttgagatggagtgtcgctctcttgcccaggctggagtgcagtggcacgatctcagcttactgcaacctctgcctcctgggttcacgcgcttctcctgcctcagcctccctagtagctgggactacaggcgcccgccaccacgcccagctaattttttgtatttttagtagagactggttttcaccatgttagccaggatggtctcgatctcctgccttgtgatctgcacacctcggcatcccaaagtgctgggattacaggcatgagccacagcgcccggccttttccttattttttaaaaattaaggtgctaagtacaatgtatgcccacattttcatttctatagaaaaaatgtcaagaggtagaattaataaatgaaagaatctttaactgtaatatttagttttcctagtgtgagctagagtgtgttttgactgcttgctcattctagtctcaacttcagtatcttcttttcccagatttttttggtgtcctgtcatgaatcctagacagatttcatattttctctattagctgtggatcatgctcatgagtcatttgcttttagccctcctctgtactgagagttgtcatcttctagatatactgatttcctgggatcagaaagagcaataggcatactccttagggattctgtttgtttgataacgctaagtatagtggcatttttgcatgtatacctagtgttacatggtgatcctactaagtactgtcaagagtttgacaaatcatgaaaaggagaaattgattcattttagacaaaactgatttattaactatgagaccgggttagagaagctttttggtcatgttaggtacatgtgctgtttcttgaattaatggagttattttttcctaaaaaggatatatttcagttaacttagaaaatatggtattgaaggtttcatttatttttaattaatgctaccaattatgtaacacctgtacatctggccagtgtcctgcaatattggcagttggtctaggtaaggatgctatgtagcaaaaatcttaatcatgtttatgagagcagcaagtagagaattggtttaatggcctttatagggttctttatgtcttttgttctattgtcagcaattcagagagaaaaagatcaggaggaatcatttcttcttttagacagcagtggaaatttgagtttgttttttttttccttaatgtgtaaaccatcatctactttttctttctagagtgctgaagggtaaaaaaaattaaagatgttaactgttgtttatcataattattctttagtacccaacttgtacaagggtttgtattaaagattttgcctgtattttagttattttttaactaaattcttagaatgactgaaaaagatgatttattcatatgaaatatttttatagttttgttgtacattgctttgtataaacatgaatcctaatcttaatgtgactttttttaatgtagaataagcacttctgtaatggtaataacatttttgaagctccgttgagtgttgctctgagtttgcaacaatttttttgatacaatttcttatcactttattgagatattattaaaggtaatgtactactcatatttaaagtgcacagtttgggccaggcgtggtggctcatgcctgaaatcccagcactttgggggccgaggcaggcggatcacttgaggtcaggagttcaagaccagtctggctaacatggtgaaaccccgtctctcctgaaaatacaaaaattagccagacatggtggcgcttgcctgtaatcccagctacttgggaggctgaggcaggagaatcacttgaacccggaaggtggaggttgcagtgagccaaggtcatgccgctgcactccagcctgggctatagagtgagactccgtctcaaaaaaaaattttttttaaatgaaattttgattttgatcaattttgacatatgtataataaacctttgaaaccatcaccgtattcaagattatgattacttccatcaccctaaagttttgtcgtctcccattgtaattcatcttttctaaatacccatcctcaagcaaccatttatctgctttctgtcactgtggattagtcttagtttctagaattttatgtaaatggcatcatatattgtggattttttttgggggggtgggcttctttcacacattataatgattttgagacctttccctgtcgtgtgcatcaattatattttttcccctctcttgtgggtattatttcattgtatgaatgtaccacaatttgtttctgtttgcctgtttatgaatatttggattgttccagttttgggcaattgcaaataaagctactgtaaacatttatgtacaaatctttgctgatacttatacttccatttctcttaggttaatacccaggagtgggtgactggtcatatggcaaatgtatgcttaactttataagaaactaccaaaattgttatttagtgtggctgttgcattttacataatttgtgttctttgaaaatgacagtttccacatcctcaccaacacttggtattgtcagattttattattattatttttaaaatttttaataggtagtggtatctcattttgattttatgtatccctgatgacttacggtgttgagcctcttttcatgtacttattagtcacttgtatattcatattcttttgtaaaatattcaaatatttttaaagtttgcaacaaatttaaatgtcttcatatagttccagaaatttcagagctttgatctttgaggcagatgactttggtatttagatagcagaaaggtgatcaagagcaatatttagtgagcaggataagtaatcaagccaagtataaaaagtccagtatttagatgagccatctatcttgaattcttgcttcactaactgaatgatgaggacagttcatctaaatcttcggtgcttcacctctaaaaatgacgatattgtaataccgggtttgcctgtcttagggggtggttgttgaaatttttagaatgtgtgtgtattcacagtctaatcactcaataatatctatagattcttcctttcacatgtttcagaatttgtgcttttcacttaatttgcccatgtcgtttctttagtgttcacttttttctttataggactgttgtaatagcatctctcaaattctcccagccacctttcactgtaaacgcagtattttttcattttaagagattttgaaaaattagaaaacgtgaaaagtattatttaatttctttatcagaagatatctacttaatcagtttatttgatttaaaattttttatcttctctctgaacttgttgccctatcgctagccctgctttctacatcctcccctatacccttgccactaactagtccatttattttgcttctgtgagttgtaagtgaagctctaacaatgtcacttgttttaaactcttaaatctgtttatggcctaccatcagttacagaaaaattccagtaatctagcatataagtaccttcatagtctagaccagtcctgtttaattgaattttctgttatgatggaaatattttatgtctgtgccatcgaaattgatagcagctagctagccatagtattgagctattgatcacaatgtacaagtaaataaccacatgtccctagttggacagcacagatctggactttgttcagttctccaactttctcttttacctgttttctatgtatttcctattttttggccatactgaacaaatttgctgacccttgaagaaaccatgtgtttatgtacatctcttgtatatacaattccttttacttaagatgtacttttattctttgtcctcttaacaaaagtctcaagacctactttcacatcatgtcatggaggactctgatttctttcttgggaaggattaagcacatatctgcactcccataatatcttgtttatgtgcctgtaagcactcattatgctgagtataattacaattattctatattgcagtgtaattgtttatttaaatatctctctcatcagaatggatgctcctagaaaatgtcaaccatcataattgtaaccttagagtatattgcctgccaaagaaaataagagtgcctgttctgtcagcttgcttagtgtcctgtgtaactttgggcaagttgtatgacctttgtatgtctgtcttgatagataacttatagatttgtaaaaggattaaatgagataatatataaaaaagggctctgcctagtgtctggtgctctgaaaaatagtaatgttagtagcatcctattgctgttgttgttattgtgaatattcaaaaaacctttgttcctattgcttacaaattatttattccatacctggatataaaaagtgcttaccaaaatatgtaaatatattaaagtaaatataaacaagtaagctaaagaatcagaacaaagggagaataaaggtaagaaaagttaaaccaagttagcttgaagttagaacaatcagacaattaaaatttaccctcagaatcactcactttgaacaagtaatttctttgtccaatcttgaaagataaaagtagttacaaaatgtgtatgaaagtcactggatgagtcactttatagaatgtgtagctagaagccaatcaaatgagatggagaatgtctgccaagaaatgatgaatctgattttggaattaatcacttgtaggcctatctgatagtagttagcaaggccattcgtttagcccaaaacaatctccaggacatgggaagaaaatactattatcttaccctttaaagtttctagggattttgtgtatatttcataatgaatacaaaatattttgccagtaacacatgtattagtttttaaatacattacctatgttagaaatgtaactcattcttttccccaatgctatgtgtgatttttaaaagttttgaggccaaatgcagtggctcatgcctaattctagcactttgagaggccaagatggaagaatcacctgaagccaggagtttgaaaccaagctgtgcaacaaagcaagaccctgtctctacaaaaaaaagaaaaaaaaaaagtaaaaagaaaaattaagaatcttgagagtatatggcatataaatccttttcttatttagctccagtttatctttcagctttctggccccattatgtttggaggtccctaactttggtcctgttctctttgcctggaaggctcttattggcttcttcacttaatatagttctaccctttgatgagtcactttgaatcttgccacttgctccttttatccagaatgggcttctgtcatgctcttctgacaaagtcatgttcagctcccaagagtccattcatccatgacctctttagagaaggctttcctgacatttcctgttcatagagtgcacttctcttcattggtcccataggatagtacttgcatgaagtgtgcccatattattctgcagtgttctgagataacaaaaaatggaattaacagtttacttaagaatgttttaaatgcctgtattttttatataatgttcgttgtttcattttaaatagcatataacggtaaacattttgaaatgtagtgaattgaattttttttgagacggagtcttgcactgtcgcccgggctggagtgcaatggtgcgatcttggcctcccaaagtgctggaattacaggcataagccaccacgcccagcctgtgaattgaatttttaatattggtacatatgtagagttaaatggtaaaattaaaccaggaccaataaacatgaaacatcttggtttcaccaaggtcaagcaccaagtgtgcctttatttaactttattctctagaatgtcaggtctcatttgtgctcatttttatagaaatgtgattgagccaaatatgaatctggacattgttcaaaggtttaaaaaactttgttggtgtttgcatactttagttaagaaattatagtccttctccttgatttctccttccttttgctactgtatatttttgtcgttgttgcttttgagacagggtctcgctctgttgcccaagctgtgaaatgcagttatgcgatcatagttcaccataagctcaaactcctgggctctaacgacctgccttagcctcctgagtagctaggactacaggcatgtgccaccacacttgactaagtatttttattttttgtagagacagtgtcttgctgtttcccaggctagtcttaactcctgggctcacgcagtctaatcactgcagcctcccaaaacactgggatcatagacatgagcttctgcacccagcaagctgctgtatttttaaatagcagtgtgcctgtatgagtgttggttatatgtttgttgtgttattaactagatctcaagttccttagtagactacctcataattttttttatttcttgttctctgtgttgcttaggatgctttttatattctcagggacaaaataaggtgctagtcttcctctctttcttcagcatagcgtctgcacagacatggagccagccagctcttcctaaaagaacatctggaaagaatgatttccatggcagcattatggattggggtttttaatttgaagggattccctttgctgtgacatctttatgtattttctttccatctagtcttttgttctgggattgtatagtgggtggtaggatgatgtgacacgctagaatctactttttcattttaggctcacacattactaatgtagcaggcggttctttctcattgctacttctctgattatatcacgttctccattctctttcagtgctccatgttttgtttagatccagagcatattagagagttaatgtacatttgtcaatgcagctcaataagaggtgattattaggacaccacatcacttaccaactttgtggtgatatactgaaaaatggctggatgcttttacttgaccatgggtgtgacctcttaaggtattattgcaagtgtgtttcgcttttatggagtgtgtgtgtatgtgtgtcttattcatcaagccattcctgtagtaagaaataggtccatgcccccacctcctcatgagaaactagaggactttggtacaaacatgtgattgcttagttctcttcatggagcaccagtaaacaaaaagtttaaatatttattcaagtcaaactaaaggaggtgtaagcactattgttgcatcaatcattaggagaatttagaatttgaactgtttaagtgaaagtcactgtttgatgaagaagcttgttaacattgtgaactttattttgtatttgtgggcttgataaatcctgattgtttttaatatggtatttcataagtactttcagaatgaaataatgaatgaataaacagacttttgttacttctaaactcaggaagtttgcaaatgggatctttgataatcttatttgtatataagacagtgaatgctgatcacactactactgagaagtttggatccccacctctaagaatcttcagcttttcaatattgcttctcttctctctttatttacagccccaaatactctgaacaggtgtatattctttgtgattctttctaccttaaaaacaaaagaagactttctgtttttgtttacgagtatctaacatcctttaggagaatactcctcctttatcttctaggaaataatatggaattcttgataggtttttgtacctagttagaaggtattgagtccacaaatagacaaaaagcatagaagtgatacaactaaaactaggacaaatgccaagttagagcagattttgttttaattttgtgaagaaatgcttattgtagaaatgtaaaatatatagaagagtatgaagaaggaaatgaatttgctgtcatcctcaaaactggagatagctactgtcacttaaaatttttttaatgtaccatggtccctcagtatccatgggggcttggtttcaggaccccctgcagatactaaaattcgaggatgttcgagtcccttttataaaatggtgtagtatttttgtgtaatctatgcacatccttccatatacagtcatgtgttgcgtaatgacagaccacataaatgacatcagattttgctgcctgtttttactgtacgttttctgtgtttagatacacaaatacttaccattgtgttacagttgcctgcattattcagtagagtaacatgctgagcaggttcatagcctgggaaccataggctgtaccatgtagcctaggtgtatagtaggctataccgtctaggtttctgtagctacactcagtgatgtttgcccaaggatgaaattgcctaatgacacattcctcagaatgtaccccagttgttaagcaatgcatgactgtattttgaatcatttctagattacttataatacctaatacagtgtaaatgcagtgtagatagttgctatactgaaatttgtagttttttttattgttgtagtggttttttgtttttggttttttaggttttatttgagacggtctcgctgtcaactagactagaatgcagtggaatgatcacagctcattgcagctttgacctcccaactcaagggatcctctcacctcagcctcctgagtagctgggattataggcacatgcctccacacccagctaactttgttttttttgtagagacggagtttcatcatgtttttcaggttggtcttgaactcgtgggctccagcaatagcctgcctcggcctcccaaactgttgggattacagatgtaatcaccaccacccccagcctctactgttatttttaatgggattttcccaaaatattttctgtctgcagtttcttcaatctgcaggtacagaacccatggacacagagggctgactgtatatatcttttgattaatttaaatattttaattaatttagatgatgctgaatgtttagttatgtatccttgtgtttgtgtttctcatgcagttaaattttttccaaaacattactttcaatattaatataatgctgtatgagtgtaacgaagtattctcacgtggcttccaatttttctcctattacaaacaacttttagggaaaaatctgtacatgactgattatttccttaggattgagttacagaaattactgggttaaaggtatgaaaattattttaagtttctacatgaatattggtaacttctcaataggcattttaaaattgtctttattattcactatgtataaaatgcttgagtactgagaggaccagagcagggcatgcccctctggttgtctggggcagttcttcctcccttaatggtgtgacactaattcagacagatttgcccagggaaccagaattaggaagactttttatcatacttgaaatattttatggagtaattgctaaagaaggagcttttgataattgtttaaagcaactcagatactaatgtataccagtggtctaagactgattatgacagtgttccagttggaaggggaataacaactactcagacatagcaaacaaattaatgctgacctaacgttattaccttttagtttgatttggtatgtgtttattaagtgtgctatcttgtgtatgtggcttttacagtgctagaaaatgtagtatttaaaagtagagaagggacgtaatggtcatctttatgaacaagggatataaaggaacccaggaattcacagatagttttaaatgagagttcattttttatcatttatatatgttactctctttttgaagaaaattaatccgctgtttgaaactttaggtttgcatatacttgagtaactatatacaaaatgtatccttttgtgcaggtatgaagatgcttgatacgcagtgtagacggaaagcagaagcatagtggtgccttttattgttctttcaatttcactgattctaattatagaagcttacatcaccttggttgatgatgacggtttctctctccttcttggtttttcttcctctattactccctaagggtggatcatatttcatagtgcatgtgtgtccagctggtggctgtgacagattttcaacaaaaatgggggtgatcagttagtggatatatatgacagtatgctgaagcacactgtttcttacaagagaataaaagagcgttggtactcttgcctcccctccttcatgaaggctgaggaataggtatgcagtttgaaagcagaagtcctaaggggcaccagtaattagagttaactgtgtctgataactgcaaagatgcatttcagatgttcatgttaaacatgggggaaaacgggtggaaaagattgttatgatcctttgaaagggcttgtatgttacctatgatcatttcagtcatttattcatttattttccaaaagacttaaagtgttttcactatgtaaatcagtacaatttaagtttatatttcaaaaaccaaatataactaaaatacagaaatgaatgtcctctttattttgtaaaactacagaatttttcttttgttctttaacttctttggcgtttgacttctctaaattatgattataatatttcattgcagattgggaataaattccatttaaaaatataataagtaaataaaatgcctgggttagtataaatccagtttttgttatcattagttttgtttgtttttcataatgcctagaatgtatatcctcttatggcttaccttcatctatggtaacctttctctgtccttcttttcagtgttgtcacatattaacataaaagatgtgtttacagttagtttagtaactatcagaaccttatctttggctttctaaacaatatgattttaagtatttcagtttgtatttttgtttataaataatatacacagttaacataaattttaataactacatggcatttacacttttataaaagtattttgtcatgatttgaatctttgcaaagtcaacatacattgctctattttatagtagtgcaaaagacctttctaaagctaaagatttcattaataagggttagcatcatggcatttcatatgcaggggaaacgtgttcataagtggctgtcctgtagtgattcctagacaataggtagatcaggacattctcctttgctgcacttaattcatttgaattgataagataatgagatgagatcgtgataaaattctaaaagtgatgcaagggaaaaataggttattcacctagtcatttattttagttatttgataaattactattctcttcaaaggatgtttatttcttcattcagtagttaaaaggtgaagtcattatttcctcagaatgctggtggatccccgtgttgagtatggaatttggcctgtttcttttcttagtattgttacacagggagatttagcatgataggttcactatacagttccctggaatcgaagatactatgagatgattggtagaaaaggaaaaggatgatgtcatcttcacttacaagccaaactaaaggaaaagagaattttgttcctttactgagttggtgtttactacagtaggtctaacatatggcactagtggattgcatttctcacactgggcagcagttttttaaagcagctaagagatggctgtctcccttgcccagcttgaggtccttctttgtgtgttgatcagcatgatttataaaaagggggaaaggtgtgcattaaaattttgctttttgattcggctataatatattctgttggtactatacatgaatataattactgtctggtgttgaaattcttggtattcttgaatcttgctactgatatttatgtgtaaaatactcatcttttagaaattttatcttaagtgaaagtttgtcttcatgtacatacaaagtacctactatcatttttctgttttaaagaatgattaacattagattttaattaatgtacaatattaagtatcaagtggaattccaactcacgtatgattgatttaaattaaactgaaaaaaaaaaaaaaacacattggtgcttgaaaaccaacctgtataaatattgcatgttttatgtttagaaaactagtcatgcttgtttgcatttgtgagatttaattttatatttaaatgcgggtattgtgtattttggtattgtgtcttttggaattttggcagaaaaacattcttaaaagctttatgaaaatctaaataattacatattttgaaagcataacttgtctttgttcaaaattatacttagtttaacttaaattctagttttataagtagcagtgtaattcagattggcagcatagtgttgttcagaaagtgactcagacttttctcaaagatattgaagaacttattttttttgtgcttaacaacaagatgtttcttctgcagtcagtggagtcctttgttaaaagacctgtctcccaggtaacatctcctcttatgttgcacaccccattttccccaaaataaaagtgttaggtaaataaagcaaaataattatattgctttgatttgttcagtgattgtttttctcataattttgccgcctggaggtataactaactatattttactattgggaactgtctttctttggccactaggagcaaccattgcaagcttagttggagtatctaatgccttgtagcagaagcatgaagaacaaggatgggtactagtggtattgtgtttcagatggaagagggtgtggcaaaattaaaatctttttctgtaatttctatagaaaaatggggcaattttttttagtccacactcactctggaagcaggtttaatccttttctttgatttcttctgagtgagttttgctggcttcttgtctttttctaggaattcagcattgggctacaggaaagtaccatgttgtgtagattattctttctcaaagaagtaggtgcatgctgcaactattggtgtacatctgatttttttccagcttccctttgcaaaatgaaattctattgtttccatttaaatttactatctacctacaaatcttagtactagtttgtatattcttaatgttaatttagagtgatcctgaaggttatatctttcagaacagttatttgataaatagcaaattttgcaagcagaaaccccttgttaacaaatacatgtgacatctgagaacctaggctgccttgtttatttggaatgcaatggtatcttatcagagcttataattttaccttgggaggacaatactgtattacatttgaataataataggaaatatggcttcccaaatatagctgtgtatcaatgtacagaattaaaaatcaaaatggatttttaaaactgtgaagtagaaagggtgctcaagccaatttttttcttaaagaatttagcttgctgacgtgtctcatggaaaggaggatggggtgtgtgtgtgtgtgtgtgtgtgtgtgtgtgtgtgtgtgtgtgtatgttttcaataaattgctcttggggctacatctgcagatacagtagccaattgatctaatgcagtttctggaggctttctgtacaggtgatgtcatccttttagctctattctcctcccactctctttccttcttattagatatttcatcttactgcagagcatagaatcaataggagcttctccttagggagctgctttgaaacaggcaaggacagtagaaattaagacactaacattcagtcttgctttagcagaagatataatggttttgtaccatattatataaaaatgtttaaccagaaaagctagacttaaatcaacagtgctgttttactgatacattagaataaggaacagtgctgcagagctgtaaacagtgcatgtgaatagagaaaataattacaattttggagattcttagacattctacaggacaaacctgttacggcatatatcatctaactgccatttgctcaactttttttttttttaaacctctggaggttaagaatataaagaagaaactttaatcttcaggatacaatgtttgcttttgatgcagaagaatcactgcagtgcttgttctacagaatgaaataagttgaagaaaagacaaagctatattacagagaggaaaggtttcacggaatccaggaacacagatttggtgcatgttgcctgatttgctttgactgataccgtattaactgttgtgctaccactctgcatgtctgtgccaggtgcctgaggccgcatgtatatgtctgtatattctgagccagaattgtaaacatcttcatttactgtgatttgcttgttaaagtgaacgttttaatttagaacaatactgaaagctcctgatttcagttttaaaaggggtttggagaggctgcctttatataaacactgcagtggtgtatgatttgtaaaaagaaacttaacagaattttatcaccgtactcatcactgtagctctggtttgaaaaggaaactaccctttccagcctaggaaatggcttttcttgttcgctgttatgccaattgtcttcagccatgggcctccaaagtaagtaattgttattttcttagcaattgatttaatccagttattaaattttattttgaattgtaaatgagctttattgcgctcttttctaaactttaaaaataagaactacaaagtagtctttctcattgccattttttttttaatttaaatatctaaaacattctaacgtgacctctaagagatttgaaaggtgcgttttaaatctgtagacttaaaatgcagtgcatttgagatgtactctcttcagactgaattattttttgattatggctattgctgtacttatcagtgatcatactctaacttgcttcattttcttaaatggttgatatatttaggtatgttagtctaattgccagattatatgacatttttcattaatatgatactgtcataaattatgattgaattgtgctattttacaattgaattgtgctattttacaaagattagttgataattcttgagcagtgaaataatatgaagaaaatactcatgaaaatcaattatatgaaaatatttaaataatgattctaagtattttcaagatagtaaaccattagcagctggagactatttaaggtcatctatcatacttgtcatttttaaataaacataataactcacaaaaaagcaaagtgctatacaaccttccaggctaggttgtaggaaaatatatactctaattcagtgagttttattatacacagtggctatttatatagtctgtaatttgatgccactcaagttatctttcctgtctcatgtatgtattataaaacagtgttttttcaaaacatttaaattgtaacatttattaagattttttatggttctcttgcatacagacaggcacaatagaggcacttcttagtatggtctgaaatcatgtctttgtttcaaggttgtcctgttgatggtgactaaggaagaaatcctatgatagcatcgtggtgtttttctgttttatctggcctagctcactgcatgtctttcttaaaggcagcttctggaaagacatttaaattcactgtccatttggcaaacagctgattgaaatgtaaatagatgaaaagaagcctaggtacacaatgtatttgtgctattatctggctaaggcttaaatggcctttttagtgaaaatgacacctatatggcccaagcattgctgatgcttgatagctgcactatactacaaaggtttaaaccacttgtagaaaggaagtgagtgagaccgtgtaaaaaaaactttaaagaaaattaagaatgagatataggggttgttttttaaggtaaccagcaaaataaaatagcctttggaatgctgatagccaacttttgatcccagatttaacaaatatggaagagtcaaaatttcaaaatcagcttctaaggtttcatgaaatgccagcaaacattatatgagcaggattctggattggtactctactgtgtaaatcaagtatttgtaagagtacatgtctccatcccccttccctcatgttactgttgatgaaattttgactctggattgcaattaaacacataaaacttagaattttgttatacttcttttcattttccagtacattttactggttttatttttgttcatgtatttttgcctatgctactatgtacttgcattttactacttctgaattcattaattttcttgctaaaataaatagtcgtattagcatggttctactgggggttggggaagaatgaatcataaatgccttcctttatatttactcttaagataattgtttagttcaatataaaataataaatccaaagtcttttttctttagcagtttgaaaaagttactacactgtcttctggcctccagtgttgctgatgagaagtctgagctcatgctttttttttcctttgttaattacttttattagtagttagttatgtttttgttattttactttttttttttttcttaagagatgtggtcctcaagcttggccaacatggtgaaaccccgtgtctattaaaaatataaaaattagccaggtgtggtgccacatatctgtagtcccagctactcgggaggttgaggtgggagaatcgcttgaatccgggaggcagaggttgcagtgagctgaaatcgtgacactacactctagcctgggtggacagggtgagaccctgtctcaaaaaaaaaaaaaaaaaaaaaaagagggagacaaggccctgctctgttgcccaggctggagtgcagtggtgtaatcatggctcactgcagccttgaactcctgggctcaagggatcctcccacacagctgggaccacagatgcacaccacatccctggccaattttctaatttttttgtagagacaaggtctctccatcttgcccaagctggtctcaaactcctggactcaagcagtcctcatgccttggcctcccaaagtgctgggattacaggcatgagccactgtgtccagcctttgttttatttattttttttaatccttgatgccatgaagttttgccctggattgcctaatgttttgttcccctattgacacttttggagtagtactctcgcaagctgaaaattctctttcgtcttcagttgtgagattattttttttttttttttgacagagtctcgctctgtcgcccaggctggagtgcagtggtgcaatctccgctcactgcaacctccacctcccgggtcaaagcgagtctcctgtttcagcctcctgagtagctgagactacaggcatctgccaccactcccggctaatttttgtgtttttagtggaggtggagtttcaccatgttggccaggctggtcttaaactcctgacctcaaatgatccacccacctcagcctcccaaagtgctgggattacaggcatgagccacagtgccctgcctgttgttgttttttaattgcaactctttttttttttttttccgtggtctctctagagagaaatcaaattgagttttttgggtttctttcaggaggttgacttaagtggttcttagttgggagctcatcttcctgatctgttagagttgcttgtttgaggtgactgtttactgggtggaggaagcattaccactttgggttctatttccttctttgaggtgctcctccagtcactggtcactgattgatttatccacagctaaagctgcaggtcatttctttgcccttatcttactgtacctatctgcagcacttgacacagctgatcacttcctccttgacagactttcttcaaagtccaagtcctcaccatgacctaccaaacagtttatgctccctcctccacttatctcctactacactcctcctcattcactgtcactgccctgatttccttgcctgttctcagacttgccaagcattcttatactgattttctcctaaattgtagtaatttacttttagtaaactcaccattaaaaaatgaatattgattgaaagcttctctgtggtttcaaaaatattaaagtggggagattactttgtcttagaattgaaaaactttttaatacttattagttacatcatttagaaacatccttccaactctcaacttttggtaaaaataatgagttaggaatgttccatgtttctcttgtagtttcacatacctcaggcacagtgctgtgatctcttggtgtatatacccaaggttctcctttggggcttttgggaaatggtaaattccataaaacaggctccatactgccatatatatatatgtgtgtgtatatatatatatatatatataatatataaatatatatataatatataaatatattattttattttatttatatatatataatataaatatattattttattttatttatatatatgatatataaatatattattttattttatttatatataatatatataattataatatataaatttatatgtaatatatatttttatattatatataatatatattatataatatatattttatatgatatataatatataaatttatattacatattacatataatataaattataaatttatatattatattatatataattatatataataataattattattattttttgacacggagtctcactctgtcccccaggctggagtgcagtggcgcagtttcggctcactgcaagctctgcctcccaggttcatgccattctcctgcctcagactcccgagtagctgggactacaggcacccgccaccatgcccggctaattttttgtatttttagtagagacagggtttcaccgtgttagccaggatggtctcgatctcctgaccttgtgatccgcccgcctcggcctcccaaagtgctgggattacaggcgtgagccatcgcgcctggcccctagaagcatcttataattctggtggcttacttttaattttgtaaggcctccattgtcttgtgcttcaactagtgtctcctatctcttgtgtgtatcattttcttctatttcaccttctgtgcttccagagtgatcttaacagtaggtaccctaagaggaatattgagtcataaggtatatacattttaaatgtagccttacatttgctccccaaagtggctactcctcaaattgttgtccaaaatgtttataccagttcatactcccattagcagtttatgagaatattgttttcctccataatttttcctgcattttgtattatcatacttgttttttgccaatttgatggggaaaaggtatttgttttagtttttatttccctgattacttgcaaggttaacattctcttccagctgtttttttttgttgttgttgttgttttgtttttttcctgctgttgtgacctaagtggccttatgttgagatggcagagccaaaaatacctaaacagtttggatatctgagtctctgtatactaaggcagttgccccaaaagttgcctgtacacttcactagggtaagccttagtgatctgagggccccctattgttgtaacaaaatctagtctaactgagaaatatagtagctcttatatcactgcccttcccagaaacctatagtagctctatattgtctataggaaccaaattcaaaatgcctagcttggcattgctgattatattctacctctagccttttctcaatacctctctttccccacccccctctatatatacaaagtattcagcagactttgtaacttcataatgtctgtattcaagttgttagctaaaaaactttcttgctgcttcaaataaaactaacagtaggccttgtggacatgtgatctccagcagagcacagaagttcagatataggaaatggatgaaggatgctgtggaaaatgggaagttttgtcagacctggtgggctggaaggacaatggggtaaatgaattgagtttgctgatgaaagatcagctgttgagtccaggtagatcaggaagagaaagagaaagggcaggtaagctgagagatagtggagaagatttagggaaccaagaacttctcttggaggaaaagcctttcctttttgcttcatttgatacaaagaaaagataaactactgggtgttgtgaactcccaaccaagtatcaggaaacaacttagtaggaaagagtaacggatttagtcaggctgcctgggtttcagatcccaggaccccagtttcctagccatgtgaccctgggaaacctttataacatctctaagattaggtttcctactctataaactgggtataatcatagtattacctcatcttgttgtttgaatgttaggttagataattatgtgaaaggcatgtagaagtgtatgtttggtacaaatggtgggcactcaaatgttcattgcagtcagcatcattattcccattgtgtaaggaggttgagggaattcctgtatgaagttttcttcatgaagtagaaagcagatgctatttgcttataaatctgtctccactgtccagtattagactgagctccttgaaggcagggcccatatgttttcatttttatgtcatcagcagagttcctggcacaaagtagaatataacagaaaaatgctagagtcagacctgggtttgattcccaactctactgcttacttgagtgtatgatctgggataagttgcttaatcgtacttcctctgtttcctcatcagtaaaatagagataataataacacttcctttttagggtttagtgagggtgaagattgctcagtacattgtcagtactatgaagccacttgggagacttctggctttggttcattgtgttacttttatgaatgacattcttctccttggtcttcttacctctgtaggaatttgcaatatatactacctcctacccctgacaccccaaccaaacaccacacattttgaaactattttcagtgtttgcctttccaactacttcattcccagatgaggtttttttttttcatatctaaatgatagaaactaagtgggaggaaggtctttgaactgtatcataccctcatcaatattctgtattgtaagcaattatgactttgttaaattttttgctgccttttctgatatacatagtagagctataaatggcctctaagcatgactttaacttatcccacaggttttcatatatagcatcttaattttctgttttaatattttctaatttccaatgtgacttcatggatttatgggctatttcaatagaggattgtttacaattttctaacatgatagttttctatttatctttttgttatgtatttctaccttatttgcagtgttattgctgaatattccctggtttcagtcttttgtaatttgttgagacttgccttaattgtaaatttttacaaatgtttttatttgtgccctaaaagaaaatgcattctggagtttttggttccattattctatgtctatactctttaggtcgtttgttaattatgttcatatcttttatatctttacttgttctgttttcgtgtattttgcttattcagactgctactgaaatctgtattaaaaatttatggcataattgtagatgacatttttgccttataaatttttttaattttaatttatttgtaattcacaaataataattgcatgtatttatggggtacagtgtgatgttttgatacatgttcacattgtgaaacaaatcaaggtaattaatatatccatcaccttggccaggcaaggtggcttacgcctgtaatcccagcactttgggaggctgaggcaggcagattacatgaggtcaagagctggagaccagcctggccaatgtggtgaaaccccttctgtactaaaaatacagaaattagctgggcatggtggtatacatctgtaatcccagctattcaggaggctgaggcaaaaggaacactcaaacccaggaggcagaggttgcagtgagccgagattgcgccgctgcactccagcgtaggtgacagagcaagtctctctctctctctctctctctctctctctctcaatctctctctcccccctccctctccctctctctcctcctctccctctccctctcccatctataagctatatcagctttcttttggttgtgtttgcatggtctatatttttccattctttgattatttaatattttcccctctgttagctttatagttatacacttttttactatgcttttcttaaatcagaaattacaaaacacattcttcacctatcaagtctgctactacagcttcatggacagtgcaaggaactgagagcactctaatagcttcatttacccttctccagacttacattctgtagttgtattttaattactgtattttaaacttcatgggatattaatgttactattttatatagtaagcattcatgtagatttacccacacatttcccattttccttggtttttcttctttcttgttcctgaaagcttccatctggagtcatttttcttctcccagtggattttattcattgtaggactgctaaggaattatttccttcagttttctttatttgaaaattattttttcccttttttgaggactgtttttgctaggtatagaattttagctcttggagatatcactcaattgtcttctggcttccagaatttatgttgagaagccagctgtcagtttaattgcttctgccaaagtaatctaatcactctggttttttttcctggctactttaaaacttttctcttgatactccacctcaccccctgccacatgtaccctggtgtgcataggtatggggggattgtttgttttggggtgggttttttgtttgtttgtttgtttttttatcttgctgggagtttttaaacctccttgatctgtgactttagatcttttgtcacttttggaaaatgcttagctatcatcttgcttctgtgtacttgctcttctcaggctctggtttttcagatgtcacattctctcactgaatctcctgtggctcttaccccttctctcccaccttcaccttttttcctctccatgcttcattctggatatttttcagactagtctttacttttcaaattctcttcttagctctgtcaaatctttaattaagcccacttgttggctttttaatttccataattgtatattttagttctagatttttcatttaattatttttctttctttgctgatattgttagtcttgtatttttctctatatatatgatagatcactaactggaccaattctgaccagtgagctatatgacctgtgagctaagaatgatttttacatttttaaggagttgttaaaaagatgtaaaaaaaaaaaaaaaaaaaaaaaaaagcatacaacagaaactgtatgtggcctgtgaaacctaaaatatatattctttggctcttaacgaagatgtttgccaacccctggtatatattaaagacagttattttagagactgtgtctggtaaccctattatttgaaacttctttgttagtttctggagtttattccatactttttatcagtgccatcctgtctcgtcatatgtgcctggttttattgggctgagcaatggatgttgtatatgtgaaaaaaaatttttttaattgagacctaggatgactttcttcctatagtgaggatttgtgtttgcttccaacagttgattggaaatgctagtaatcctgtataaccttattttagcatcaggcattgaggtcattctaaaattagcatcagtttacttttgggtgacatttactctagagtctaatttactctccagggtcccagtgcaaagatggcccttccatcctaggccttggaatttaacttttgtccctttagccagtggctgtcacaggtacttcttggccttttagccttttctttaggaatcagaaaatattcttaggagaaaaagtaacgtcagaggccagatactgtgtgtgtgtgtatgtatgtatgtacttcaggttttctgtttgtcttagtactaggattcgtctgaattatctaacataccattatcagcaggggaagttcgtgatgtactttatgtgtaatttttataattacattaactcctcttgagataacataattcagactcagtcattccctcagaatacatttaatatacactatgtgtgtgtttctttaatgtttttcattagtaaagcaatgaggaaccctattttaaaaattaaattgattttgatagccctgaatagcaagttgcagagaaatcatttggaaaataaattagcatacttcttatgcaaaacttttactactctggaatgcagtggtttgtttattgtcttaatttctgtagcttgtattttgtgagatgtctcttttacggcatgaaatatattgtacagcctgcatacctggtaagaatgcgaccatattaaagatgaggtggtggagtcatttactttttgtgtttcttgtatacctgtgcctagtacagacattcattaaatcatgttgattactaagaaatctctcaggggccaactagaagctaattcaatattaagtgtaaagatgctcacagaatttttggaatatttaatgtaatcaacttgttactggtcttaagtcttgctgccagtagctgaacttgattccaagatattgctgttttattcttgtatcagtcaccattttttattaggagggagggagggagagtgagtgtgtgtgtgagagagagagagtgtgtgtgtgtgtgtgtgtgtgtgtgtgtgtgtgtgtgtgtgtgtgtgtgtgtgtagggtaacattcctacccttaaatggacaggtctgatatttttatttgggaggatagaagggccaagtttttcctctgaaatatcattagtaatggcttttgaaaactgttcagtgagcttaccattgtaggattgtctaatagtttcagagagtaccatatggttcttatttcaaaagatctttttgctgaaagtagagaacttgggttaaaaaagagattgcacagtaatgtacataaaaatttgttgaacatgtcgaaaccgcttaaaaaggtaaagcttgacatttagaataacttaaattattttttttttcagcttccagctgatcttaccaagatgcatctcacagaaaaccctcatccacaggtgactcatgtgtcttctagtcagtctggttgtagcattgccagtgactctggaagcagcagtttatctgatatctatcaggtaataccttaggaatttgtatgctgcgtatatggtttttttatttgccagatattctgtgattgtgccttagatggttaacatatcttttagagtatgaaattcaagcgtaaggtctttagaaaaataagctttatatactgtgtcaaatttgtaagcatgattaaagacgtgatctgtcttttgagaatgattaagtatggttcagcagagtatgaatctagtgttctctttcatttatccaggtgaatccatattaatatctaatgcttgttttggttaaaaaattagttcttggaataactgaacttaaacttataaaaaggctgatttttgttataattgactgtatatgtcttctgtagttagaagtcatgaagaaaattagagctgcttttctaccataaagcctctgttgtagtctagcgtgaattaaatagcaaattagtgagaatattgatggacttttccattttctaaaacccaagaggaacaatttcaaacctactgagcttttcagtgatcattgtaatattggggagaaggttctaggaagacccataaactgagagaatcctcacatgatcctgctgagattgaacccaagttaggttcaagccagggtaataagtatttcaggatccagatagtggaacttctatgatgtcttctttaatgcaagttgtaaggagcagttccctgggtgtggagcccagtggttgattttgtcagagatcatgagtatagaacataaaacagtttaaataaaataacaagaggatgcatgatattgagggttggtttgttaaggaattcaaatatattacctatttcagaactgtcaaatagaaatttaatgtgagccacgtatttaattttaaattttctagtagccacattaaaaaatataaaaggaaacaggtaaaattcattttagtaatatattttatttagtgcagtataaccaaatactataattacaacatgtatttaatgttttaacattatgcatgagttaccttacattacttttgcatattaagtcatcaaaaaacagagtttaatttaaagttacagcacatctcaatttggactagccatgttttaagtgcctaataaccacatacggctagtggctaccatatactaagaattgtagaaatagtatcattgtctgaggaaagcattttagactggttctacaaagttacccagattgagatattttaggaaaatagccttcttctattcagggaagtttgtaggcagatgcaaaatggaacaaagacaatacccattttttggtttatatgtggcttttctcaacaaaggtaattgctgtggtcatctatatctccctgtttgctttttacagtatacagaacaaggaatttttccctgttctccattttatagtagagagaacaaagaattaaaagagagatgaaacaagttaatacaatagctctggcaccacttagtacttgtgtacctattgggcttcatgctttctgcccctccccaaaagaattatcttgtgaaagaagaattgttgcacacctaaaaatcaaagtagactgtgtttttccagaagaaaacactgaggaagattgaccctggatcagtgaaattcagggatgtggctgtagatttctctcaggacatgtgagaatatctggacttttctaagactatacacagaggtttagtgttgaaaaactataggatgggaggcctaggcgggcggattacctgaggttaggagttcaagaccagcatgaccaacatggtgaaaccctgtctctacgaaaaattcaaaaattagctgggcgtggtggcacacatctgtaatctcagctacttgggaggctgagtaaggagaattgcttgagcccaggaggcggaggttgcagcaagccaagagcatgccactgcactccagcctggccgacagagcaagactctgtctcaaaaaagaagaaaagacaagaaaaactataagaacctggtatcactgggatatccacatctctaagccaggatagtgcacagattaagattcaaggtcacttggaaagaccagtgctttattgtgaactagaagatggactgtacacagttggtccctacatctttgcaaagatactacaggagctcctataggagcattgcacttatattagcacctgcagattactccccttttagctggacaacctgaggatgagactggagtacacctgctggtgttggttggaggtgttctattgcaggaccatggcatagcctatatcaatatgtagaatatttccatcacctcagaaagtatccatatgaccctttgcagtcaagtaccttctcctgacccctatcctatgccctggcaaccaccaatctcttttctgaccttatagttttgccttttccagaaggtcatataaatggaatcatatagtttaaaaaaatatgatgcaatgaaacttataaattaaccaataaaagtgggaatgaatttagagagcatgaaaagataaaaggaataaagataaaataaataagataaaactctagaaccaaaataggaatgaagaaatttaaagaagaaacttataataatgttaacatcaaatatataaaacctaagataaaattttttaagagtagtcaaagaagataaaaattttcaaactctgctgctgggcacagtggctcaagcctgcagtcccagcactttgggaggcagaggtgggcggatcacctgaggtcgggagttcaagaccagcctgatcaacatggagaaaccctctctctactaaaaataaaaaattagctggggtgatggagcatgcctgtaatcccagctactcaggaggctgaggcaggagaatcacttgaacccaggaggcggaggttgcggtgacccaagatcacgccattgcactccagcctgggcaacaagagtgaaactccgtctccaaaaaaaaaaaaaaatttcaaactctgacataacagttaactttaggaccatagccaaaagatagaaacagcataaacgccaaaataaaaagaagccaataaagataaacacaaaaggaaaaaaatcaaaatcataaaaatatacacctacatacttatatattttttatatctcatatgtataaaatcttatatatcatatctatgagataagtaggtatttttaacattttatttatatttcgttaaataaatatatatacctgtatacttaaatatgttatacttgtagatacagaatgtaaatccgagttcaagaacaccagttagtaacagtgtttttctactagtggtgggtttgtgggtagtttttattatgtttcttaaacgaacatttttatttatttaacaaatattaaggaggacgtaaatagattgtatagttaaaagttgaaaaaaaaattggaaaatatttaaaggagagtaaaaggaataaacacagaattataatagattgataagatataccctccaaagtacaagatttctataattttaatccatgggtaagagaaatgtctaactaaattttgtgtgtgtgtgtgtgtgtgtgtgtgtgtgtgtgtgtgtgtgtacatgcgcgaatgtttccaatcagatcctcgggaataaacaaggagaagaattaaatatcagtactggacccttgatctttcctttcaccttaggctgcctttagattcccttttggagctatgaatataccccttagttacaggtgtacattgccaatgtatgtatcttagcctgggatagctgaagtgatttgtctagttatttgaattttagcatttgagagattttttaagtgaacacctagcctttaacaccataagaaaagccttgtgaaatgatagaagtatttttaatttggacagttgaggggaagatatcctaacagcaatttttttttagtgtttctgcttttattcttctagaaatttagaaacgtttcaagtgaaatccagctttttttgtggggcagaagactatatatagattaatttgggcatttttttctaacgtggagtcttcttatccagaaaaatggatgtctccccaatttttaaaaataatttcaacttttattttagatgcaggggggtacatgtgcagatttcttacatagtatattgcgtggtgctgagtgtttggggttcgaatgatcccatcacccagatagtgagcataatacccatttggtggtttttcagcccttgcccctctctccctgccctaatagaccccagtgtctggtgttcctatctttaggtccatgtgtacccaattgttagcgcccacttataagtaagaacatgcgggatttggttttcctgacagcagttcttaacaggaaaactgtttacactgttttatatggccaaatgtgtggctacacttctatgcatttccttcttgagagttttcatgtcttctggtctaaaaataaaagcccttggccctcaaagaaacttcaaaatatagcatgtactatagtgtggagggaaaaaaaggcaaatcagtgattccagtgtgaatgtgtttctaatcagcatagattaaaattttaaagtatacattaaggtgtaagagtgttcttagatagaatattttctgcatcttcaaagagtattcaagagaataaggagtacttctttctagattcctttttctatttatttcagtcttttccatgagctggaaaactgtgaaatattgactcttgaacaaaagcatgttgtctttttgttaactcattcttaaacaactccagacacacatttatccaccacctaccttttcagtttctatataggcagtaagcgtgttcttaaaaatcccaagacttcagttaccacctctatggcaacatgatttcctaatgcacagctcggagtgccaatctcttcagaactctggtgccacgttttcaccagtatgttcttttgtcaactcaagtcaccacatgttctcttacacctttctttaatatttctgttaagaatatcatctgaggctgggttcggtggatcacttgaggtcaggagtttgagaccagcctggctaacatagcaaaaccccatctctactaaaaatacaaaaaaaagtagccacgtgcggtggcgcatgcaccagctactcaggaggctgaggcaagagaatcgcttgaacccaggaggcagaggtgcagtgagccaagatcgcaccactgcactccagcctgggtgacagagaaagactccgtcacagaaaaaaaaaaaaaaaaaaaaaaaaaaaaaaaaaaaaaaaaaaaaaaaaaaaaaaaaaaggatatcatctgagtcctagtcaaaatctgttatcatcttttgactatcatttttaaactcccacttgaaataaattgctctgatttttaattactcttgtatttaaaaagctttaattcttcactgttatctaaattacactcttaattttaaattccaagccttttacctctaactacaatgtagttttatattttactgttcccccacttacacattctagattctgccccatcacatatgtacgttattccctgaacatgtctgccttttcctagtcttgtgttttaatcatgctcttctacccgtagcttcatgaagatgacattttcatgttatctcccatgtctttccaacaagaagaaatgtctccttccttggaatccctcagcagtttttctctcggacatgtcactttttctctctgctttttttggtagttacttgtaaacttgacatttttcatcaccagagtaaatttatggagtgcagagttgatgtcttaaatttgtatcccatggtgagtcaggcacagtgttggcatttaggaagtactctagaaattcttcttttgcattgaattatatttgaaagtagaaaccaatattggcttcaaggaaaatgcagatctctgctaactaaaactttattatccagggcaaaagagacttgattttgcctgcctgccgtgttgtagaggttatgaaatgggtcaacctggactgaaagattaacttcatagagttctaaccctgaccaggaagacctaagaactaaatggtccatgaaaaggttaaatgaaatactaaagatgggaatacagaaaagagaggcactgaaagtctaaggcttaacacttgccctaaatttgaaaatgtggtttttgtaagtttgtataactcttagttccaacctatagttctcttcattgtagcttcatgtttatctagatggaaacaggaaaaggatatcctctggtggtttatttggggaaggccgagtcatcagaaaatcacctcagactgtctgcctcaccaaattatatttatgtatacagagacacattcatatgtcaggaaaagaaaaaagtttcatgctgtcttaatcctatcaccaatatatatatttttcctggacttaactcatttatcataattaagggtctgatatgtcccaggtgctaggataaattaattgaaaggctggggatgagtcttctgtgtaccctaccttcacgaatacggagtgtcttttgacccacatatttccactcgtggtattatgatatgagtctctaaggctttattaatttttttttggcttttttctcatctctacttcagattgggtagcttttgttgccctttcttcaaatttattcttcttacagtttatatctccttactgagattatccatttttcctctaattgtttttcttctaaattcttgaacttatttgtagtaaatgttgaaagttcttgtctcttactttcattatctctatcattatcgagtctctttatagtggtttgtttcctgtttataggtcacatttccctgcttcacttatgtagtaagtttttattgtatgctgaacattgtggatattacgttgaaaaaaattcttacctaattattatagaattaaactttctgcccaggaactgcatcttcagaagtatcatgcagtgacttcttgtcctgtggtcataatcatatctacctttctcttaaggacctgactttcctttgtttaatcaaggagttggtctttacatttttaaaaattcattttaagtttaaaaaaatccctttaaatttcttagcatgtttttgaacagtcttattttttattcttaattcctgttttatcaccttatgctcatgtatactcttaatattttaatagtttaatgtattttcttaactaattttattctttttatactactatgtaaaaagtagaggtataagaaaggtagttgtggtttttggggggttttggttttggtttttgagacacgttctcacactgtcacccaggctggagtgcagcagcaagatctcggctcactgcagcctctgcctccaaggcttaagcaatcctcccacctcagcctcctgagtagctgggagtgcaggcatgtgccaccacacccggctaatgccaccacacccggctaatttttgtatttttttgtagagacagggtttctccgtgttgcccaggctggcctcaaactcctaggctcaagcgatctgcatgcctcagcctcccaaagtgctgagattacaggcaggagccattgtgcctggcttagaaagacaaattgtaagggtagattatattctttcctttgcagttggtattaaaaggttcctaaaaaagttcttttagtagccttctctcagtcccaacccatgacttccattcttcctaaagagctatctccttaattgtctttgcttctcatgcagatgataattagccttctctactgtccatataactaaattccatcttgcctttttatgttgtgagccatctatctttttatccaacataatctaaaatatgggaatgagaccagattgaaataatctgggtcaggggatgaaaaccttagattaagatgaagacagagtgatttaaaaacctgaatttttaatgcagattacacttaaaaattgataaaatagaaaagggatatactaggagtgagctctcctgcatattgagaaattaaattgtgtagaaaatactgctttaggttttttcccagtcgtttcttagattaaatcagtgtatataaataaggtttttggaaagtctttttagcatgtacacatatttaaatttaaaactacttgtctttaaaaaaggattataacctgcaaacaagtttgtggttctatgtattattcagaaatatactccgtttaaaccctgtaatttcatagccagtaaacaactcagagcgtactagtcagtcatgagatacagttgcccctatatgatcctgtcttagtccattcaggctgctgtaacaaaatactgtagactggggggtagcttataaacaccagaaatttatttctcactattcttgaggctggaaagtttaaagatcaaggcaccagcaagcagatttggtgtctggtaaaagacctctttctgattgttagaggtaccttctaactgtagcttcacagagtagaaggggagaatgagctccctcaggcttcttatatactaatcccattcgtgagagttctcatgacctaatcacttcccaaaggccccacttcataattccatcactcaaaataagaattttgaggaggtacaaacattcagacaatcgcagacccttaagaactagcttgtctaatttaaagatcacaatttgagtatttagtctagattgttaaatgactattacttaaagctgtgcagaaatccaaaggaagtataagacatggtcttaggaaacagatccagactcttctagttgtaggtgtcagagccttaacttgaattaacaaaagccaaaaggccagtgcctgtggtcctagctactagggaggctgaggctacagtgagctgtgatcataccactgcacaacttgggtgacagagtgaaaccctgtctttaaaaaaaaaaaaaaagaagaaaaaaaatgtaaagccaaaaggttagtttattgaccaccagagaaagcagaggcaactctagcctcagggtacctggatgcttgcaggtacgtctgccccgtctgcctgtttctggtcttttggctccgtacggcttgcttatttttccttgcttgcttgctttgtgacactttctgtcacaaatgctctttgcagcacatgctgtgctctttctttctctgccctgcatgctctgtttctgttgctttgttgctctgagtctttgtttgactctcttgttcagtgtcctcctccccattccctttcctatttccctgcctattggtttcattttcttctgccacaggaaggcgtttccatgaggctataggctgcctactctcatattcttccaatttagcaaccagttaagaaaggatgctctgcttccagatctaattgtgtacagaaatctagagaaaagctctttctaacttagtttacatagctagggaacagggcactgtttcccactgtaatctctgggtttaagatggagaggaaaggtagtcctcaaaagaaggaagatcagctgggcatggtggctcaccctgtaatcccagcattttgggaggccaaggtgggtggatcacatgagcccaggagttcaagactagcctgggcagcatagcaacctcccccgagtctctacaaatatttaaaaaattagttgggtagggtggtgcatacctgtgttcccaggtattcagggcgttcaggagagaggatttcttgagtccaggaggacaaggttgcagtgagccgagatctgcagtgcacaccactacactccagtctgggtgacagtgggagaacctgtctcaaaaaaaagaaaaaaaaaaaaaaaaaagatgatctttttggcagtaaaaaagggtaaatgttcaaaacatgagatacttaatgaattaagattctgtagtcttcactaatattcatatttgagtgctttctacttattagggaattcttgtgtgttcactcattttttctataatgcctttaatacccatgctttttcattaacaagatgactcaagtgagtataatatttagaaatattttttaagaatctacttagtaccattttatcttctaaaagacattttcattattttctatgaatgactttttaatatatggtttttaaaaattttatagtttctttaaaatatgtaagactaatatgtttccaaattgtagttgtaagtataaggtcattttatagagttcaaaaatcacagctctttgcacacttttagatcctacagtaaagtattgggaaatgaagagtatttgttcagtcctttacgatgggtctattttagtgcattttagtactgttctttaccttactttaaacttctgttcttaatttatatgattacctaccctactaagcctaagtctctgtgatgaaagaacagtatcttcttcacaatacccagcatagactaataggtactcataaggtgattgttggtaaactttttctttcctgtacttcatgttttagtaaacttagtacttttaggaaatacaagtgttgggtggaaaacagatattaatacatttagtgatgtttgagtctcctgaccattttacatttactgattctgatttatcacctagttgtcacactgtggaaagatgagcctctaaatttggggcagaaagaaccttttataaataagtatcattttattgtattcttgatgcagcatccagcgttgcccaagtcttttatattttgtagggatgggtagttttgattaattcagactgtgacttataatattttttacatgaaatggtaagtgatcaagatttcttttcataggctacggagagtgaggtaggagatgtagatttgacacgtcttccagaaggacctgttgattctgaggatgacgaagaggaagatgaagagattgatcgaacagatccattgcaggggcgagatcttgttcgagaatgtcttgaaaaagaacctgcagacaaaactgatgatgacattggtaagaaatatatgtgttcacaataagaatttgtaacttaatttatatggttacctatttctgcataacaaattattctaaaacttaataaatgtgtgttgtgttaagccattatcttagagtttttgtgagtcaaatttaggagcaccttagctgagtggttctggcttggtatctcccatgaggttgttgtcagaattgacacagggctgcagccatccaggtcttccctgggctgagctgtagaatctgtgtccaagatagctattcaaatggcctttggtgcatgaccttcagttcctcatgtgggcctctgataggctgcttaattgtccttacaacatacttaaggggaacttaggcttccccctaagtaagtaatccaaaggagaataaggcaaatgccacagttttttattatctgtattcaagagtaatgcatcatcacttctgctaaattctgtttgttataccaggtaactctgatacagtatagaatgggtctgtacaaggacatgactatcaggaggcagggatcactgtgagccatctttgaggttggctgccacaatatataaaataaaagctttgattgcattaaactgatttttcccttcatgtctataagacatttaaagcacaagcatagtacaatgttcagtgtctgtgaatttgctttttgaaaaacttgcagattttttaaaaccttatatttttatttccctagcttaaatatatgtatgttttgtgtgtactcttatttttttttttgagacggtgtctcactctgtcgcccaggctggagtgcagtggcgcaatcttggctcactgcaagctccgcctcccgggttcacgccattctcctgcctcagcctcctgagtagctgggactacaggcgcccgccaccacgcctggctaattttttgtatttttagtagcaatggggtttcaacgtgttagccaggatggtctcgatctcctgaccttgtgatccgcccacctcggcctccctaagtgctgggattacaggtgtgagccaccacgcctgaccatgtgtacccttaaaacattataaatttttttatgtaatattttacagaactagttaccatactttagttgggaagttgaatgatactaaagatgttaatgttatctttaagatgcaaagatcacttagtgtcaaacatatattgttaggatttaattaagatttttttcttagattgcatttttataatagctacccttccaattagaagatgctgctactattaaaaatcatttatgtgagtaaagatcaatgtatttgaacattccttgccattctaaagatataatacagttaaataacctgcagtgtggatttatgttatgaacgttatctcgacagaaactgaaagtgcaattttactgataaagaattgtatactatactattttcataaaactttttaaaaattgaaatatagctaattcctatgtcctatggatatatagcaccttatagttattcttaatctctttgctgactgcttatatgtgtttcttatatttataccttccttacacatatatccataccagggagtggcctgaggcactcataaacatttgttagttaaagagagttacctagttagttagacaaatcttgagctagaattcacatttattatccctgttttaattactttttggattttattaatggcatttttaaatacttttgtttagtaagaactagacaaaagactttttcactaacctattagatcaaaggccataactaaacccatggagtggctaggaatattagataaacgctccgctttcatctgaacctgtatggtccttgttctctctggaggttgtgaattctgttatcttccaatatgcccaggtttatatgtgagtctgaatatacatattaatcaaataattgattttaaaaatcaacggtcaaatagtaccttagtttctctactttagcaacataaatttataagttgattgtgaaattgggaattgaattctagatttcgttgtatttttaaggtatagtcctcgatggtctttataccagaatttctgttttcttatagaacaattgctggagtttatgcaccagctccctgcatttgcaaacatgaccatgtctgtaaggagagaactctgctcagtgatgatttttgaagtggtagagcaggctggagctattattcttgaagatgggcaagaggtaggtcaataaataaattacatacatttattatggatactaacttttaaaataacttaatttccataaatttgtcctgatttttgagtactgatttttgaaatttatacagatttcttaaataaatgccaagtttgagttagttacaatttctgaagaggtaagtttttgtttttgctttgccctaattttaaatttattcgcagtagactctgcacaaagtcagtgctccataaataatattcaatgaaccaaatgtttttacttctcagattacattaaatttaaatagatgaaatagatttaaaagattcttgaatatttttctatttgtataattatatcattattgtttaaaatgtttatcaagaatttttcttattccttatttctattatacatttaaaagaaaaagaatgaggaacatgtgttggtaccagtgcatcctagggaactgctgacagttgaagcgtttaggtgacaattctatgttcaaaaatgctcggatgacagcttgtggatgggtggaggaaggatgcaaagggattggaaggtattattgccatcaggaagtgcttcattatttttcctatcaaatgtactcatttgattaatgctgagatatcagtaaatgaacattgtcttctagtggaaatgtaaattggtacagcatttccagataattattttaaaattcttaacatggtcctccaagtattcacagctgctagcctgttattccacttctgagtgtctaacctgaggagacgtgtagaactcaaagagttatttcaaaaggtgttcattgcagtacatttataatataaattatatacttatataatctataagtaagttatatataattacataatttcatactataaatatatataatatataatattacatatattatatatataagtaaaaattggacataaccaaaacatccagtgataagcgatggttaagtaaattattatatagctgtaggttataatatataggtatccaaattatttttaaaattatttgatagagtatctttgaggatccctgtctctaggctctgtttacatattttctccccgtatcctagaaaacatctgtcatagaggatggactccccccaaaagtttgatgaacaaatgaatatagtattaatttttttaaacaggatattctaaatatttcaataatataaaatatatacataagagagaaataagctttaaacaactgaatggagtgggattttaagtaacttctattttatacaagtttttgcattctcttaatttccagttgtatcagcaaaaatttgttgtatgcctactttgtgccaggtactgttctagatacggggatatagtggtgaaaaagccagatacactccctgtcttccagtagcttaatccacaagttgtgtagtgagtatatcttatttttaaaataataaaggtatacttttgaaaaaaaataccttattgccattgattacccttcagaactaaccatcttgatttcccttaaatcacattaaaactattgaaggttcaggcttataagagggtttgatattaaaggagaataagtggtctttcactgatatatagtagatctttaaaatacatcttctttgggccaggtgcagtggctcatgcttgtagtcccagcacctcaagaggcctaggtggaaggatcaccaggaattcaagaccagcctggggaacatagcaagacctgtctctattaaaaaataaattgaccaagcatggtggtggacacctgtagtcccagctattcagaaggctgaggcaggaggatcacttgagtgcaagactttgaagctacagtgagctataatcataccactgcactccagcttgggcaacagagcaagaccccatctctcaaataaataaataaataacttcttagagcattaaatatttccatataaatgaaggcattattttcttaacgtaggagaaattttgaatcttttgttagatatgccttaaaattcaggcttttaactagtctttctgaaataatcattagctatctattttttttcttaaatgtttgctttttgccaggcactattctaagcacagtgtatgtgttaactcatttaattaacataatagttctatgatagatactttccatatgaccattgtagcagtagagaaactgaggcccagagaggttaaataatttacccaaagtcattcagctagttggtggcatggtatggattaatatcccaagagtttgtgctcttgaacattacactattttgtctcagaatctggtcagttatgacagttcttgtttggtgactaaaagaagaaagagtaaaaataaactttagtagtttgcatagactcaaagcatagggtgttacagagtgtttggtaatataaccagatcctcctttttcctttttattcaagttatatatattgatagattctttttcaaagttaacatgtaactaccttttttaaaaagattcataaaacctttgtttttctctatagcttgactcatggtatgttattttaaacggcactgtggaaatcagtcatccagatggaaaagttgaaaatttgtttatgggaaatagttttggaattactcccactctggataagcagtacatgcatggaattgtcaggactaaagtagatgattgtcaggtaagattatctctttggtcaagtcttcttgtctgttggtttaaagtagctgagcctgttttgtcttcctcaaaagaaaatagctttatttgagaattaggagtttcaatagctcacagttaataaaggaaagtagattttgtatctgcctcaaatatttgtggcatttaacaagctataagttttcaaaagagattataccaaataaatgctggtttgttacatttctatttgatattagccagctcagagtcctttatttaaaaaaaaaaaaggaaagaaataggaacttctgagttgtttgtttctaacttactcctgcttcatatgttctttacatagtgtcagttttgagagaagtggaagttcacttctccttttaaagagcaaaattcaaacagattagacttctttagtctcttcatacgtgaattgtttcaccttgatttttgttaaagattaaaggaattaagtgaaaaagaactaatgccgctagatttcttacctttgtgctctgcattggtacatagtgatatatttatgtactataggttcattaactgtccccatgttgttcttggacagtttgtctgcatagcccagcaagattattggagaattttaaaccatgtggaaaaaaatacccataaagttgaggaagagggagaaattgttatggtacatgagcatcgggaactagaccggagtggaaccaggaaaggacacattgtgatcaaggtgggtgtttttacttatttttctagtcactgattttattctatcatcaaagctttcatcttgttttaaaccattttttaagtaatgcaagataattcattaacactttggcatctaacttaaatgttgactctttgtctttctctaaaattttttttttttttgtgatggagtctcactctgttgcccaggctggagtgcaatagcacaatctcagctcactgcaacctccgcctcccaggttcaagcgattctcctgcctcagcctcctgagtagctgagattacaggcatgcgccaccatgcctggctaatttttgtacttttagtagaggcgaggtttcaccatcttggccaggctggtcttgaactcctgaccctgtgatcctcccacctcggcctcccaaagtgctgggattacaggtttgagccaccatgcctgatctctaagatggtttttacacattttaatgatgaaggatgacttattgccatttaatatcagagtaggtagggtattattttagaatatactggtcagagttttccttttcaaacttaatattgtatgccactgagagcgggagtcagtttcatcaaagactgcaatatttagaaacaaaacagaaaatttaaggaccagtcataaaagcataagtaatcctagattaagatgcagagtgcttctggatctctgtggcactgaaatatgcattgacttctctgaacctcacttttcttatctggatatggaggtaattcaagactttattagggctaaatgaggtaaatcaaaagccttagcacaattgtagagtctgagtattaacccccatactgttttcccttctgtaagttctgccctctcctaatacttgccttctcacctccttttctctttaaagacttggatataaactgaacaattatagttgaaagaggggaaataaacacataactgtttctcttttcaagctagtcttggcgaaattattgccactattaattgcagatgaagcagtttacttaataatatgagggagttaaatcagagagataatttgaagtctgatgtcatacttcttcttcccttagagtcaggctattcctcagagatctttcttttcctaaacagatgagtgtaagctttgtgtgtagaaatgattaacatactggtggaatgccataggcttacacatatactttttcattttaattcatttttatctttttgtgaggactcatgtgttttagtaatttatttctaaataatttcaaactttatagaaaagttgcaagaacagtagagagatctgtcactgattcctcaactgttaatattttcactgcatttgctctattagtcttttttctgaacgatttgagagcagtctgcaaatgtgatgcctcatcactcctaaatatcttattgtgtatttcctaaaaacaaggacactctctgacataaacaccatagaatccttcaagttaggaagtgaacattgctaaaataaaaccattcagggccgggcatggtggctcatgcctgtaatcccagcactttgggaggccaaggtagacagatcatttgaggtcaggagttcgagaccagcctggccaacatggtgaaaccctatttctactaaaaatacaaaaattagctaggcatggtggtggccgcctgtaatcaatcccagctactcgggaggctgaagcaggagaattgcctggacccaggaggcggaggttgcagtgagccgagatcacaccattgcactccagcctgggcgacagagtgagactccgtctcaaaaacaaacaaacaaaaacagattcagtccagaaaccctatttagattttcaccagctatcccaataataacttacttctggtctagagtgttgtccaagaacacagttgcatttagttgtcatgtcacttcagtctgtaccagttcctcagtccttcactgttgttaatatccttagcagttttaaagaatacagatcatacatcctgtagtattaccctccacctggatctttccagtatttcctcatgaccagatagattcaagtcatgctttcctggcaggagttcacaaaactcagagggcacacaatgtcaacctgttgtcctaccaatggtgaagttagccatgattactgatcatgttggtgtctgtctgcccagtttcttcagtgtaaagtcatcattttaccctttgtaactgataaatatttggtggagagatgttctgacagtatcaaaatactatcctcagacttttagtttatgtatagtatgcactgaatacaaacttctattcggcactttttacttccattactattcttgtctgaaatggtgattttaaaaataatttctcatgcatttattaactcattgtattgaaggaatgaactgtcttgtcttcattaatttatttatattggtataaacttatgttaccatcattcttattctgatcctcaaattgtcccaggttttaggtagtgggactcttaaactgacacctgtattttttgacatatccccatcatttgagcacatccgtataatctggcaaataataaggctcatcgtgaacttaactgtaccagctctggaattagccatttctcaagaagaccctgaatctttattcattgttactgaagtgtcattgcttttagagtctttcatcagagctaggaaatatatgtatgtatttgttataaacacatacacatctataactttatatatatattaaacaaccatgagttacaattccactactacctgtacctccagttccagtaccagcaccacagttttccctagtctattcccttctatatttgtaaataccttctccaacaatgcctcttgttatactctgtatattatttgctcattgtaagcagtttctaccatgccagtataacaacaccagccatctcttctgcttgctacctctgtgcaccctgtctcccagcatcccaccttctaatatattttacaatagattttaaacactgtgttgatttttttaagtgaaagttcagaacatcaaaaatacttgaacataaatttgccgtgagtttatacacaccttaaaatgtttccagattctgattgcatgctgatgggttgcttttgtgacataaatattgaaaatgtgttatttttactgtactacaatcttcacattgagatttaattgcaaatcataaccgtcttttgctcatagaaggattgatcatttgattttttttttttttttggagacaaagtctcactctgtcacccaggctggagtgcagtggcacgatcttggctcactgcaacctctgcctcctgggttcaggcaactcttgtgcctcagcctcctaggtagctgtgactacaggtgcatgccatcactcacagctttttttgtttgtttgtttgtttgtttttgtatttttagtagaggtggggttttgccattttggccatttggccgggctgatctctaactcctgacctcaagtgatcctcaggtcaaggccaagcatggtgcctcagacatgtaatcccagcactttgggaggccaaggtgggctccagaagtgctgggattacaggtgtgagccaccgcacctggccttgactttctgtttacacataatcacacagaaagcagttactacttttcatttcattcatttcttcattcattcagttcatttcttcatttattcaacaacactgactttatggtactctatgccaggccctgtgtgagatctgggagatactaatatatacttagattctgctatcagtgaactcacagtcttttgagaaagacaaggcgatagtttcagcatgacttgataaatcttaagatggaagagcaagagagacataaaaagagggatctaaattaggctagaagaaatagcaagaagatatagggaggaagggtggccagacagagacatatgcatgtgctatataaaattgcataatatatttaagaaaaagcaggaaatttgtgtggctgggatcaagggcattttgaggtaagatagattttagtctaaagaggtaagggctcatctttaaataaaatttagaatgcatgacctagtctctatagggaccctgcctctgtgattttgccagtcagaataatggcctaacatgttgaacagttcccatccctcactcagctattctaggaaatggaattaagtgaacctaaatgaccctaaaccaggattggcctgagtaataaaacaatttggtactcttaggcttagaatgttttggaggataggagaataggaatgacctatgattttcttatctcttaaggaggttgtttctgagttccttctagagaaacgattttcgtaccttatttttaattaataaaatagggccaggcacagtggctcacgcctgtaatcccagtactttgggaggccatggaggatggatcacgaggtcaagagttcgagaccagcctgaccaacatggtgaaaccccgtctctactaaaaatacaaaaattagctgggcatagtggtgcatgcctgtaattgcagctactcaggaggctgaggcaggagaattgcttgaacccaggaggcggaagttgcagtgagccgagatcccgcagcggcactccagcctgggcgacagagccagactccgtctcaaaaataaataaataaaaataaagtaccttttaataaataaagtacctttttatttttaatagattcttagataaagaacattgttagtattaatgtatgtttaccacacagttattctaaacaatgaaattgtttggatgactgcaacaaattgaaggttgggtgttatggataacagtttttatatcaggcttaacatcttgtttgtttctgtatttgttcttgtaccaacctttgaaaaagctacaaagggtaataaacattggttcagaagctcaaagaagagcagtatggaaatttttgtttatattcttttttttttttttttttttttgagacaaagtctcgctcttgtcgccccagctggagtgcagtggcatgatctccgctctctgcaacctccacctcccgggttcaagcaattctgctgcctcaccctcctgagtagctgggattataggcgccggccaccacacccagccaatttttgtatttttagtagagacggggtttcaccatgttggccaggctggtcttgaactgtggacctcaggtgttctgctctccttggcctcccaaagtgctgggattacaggcatgagccacaccacgcccagcctgtttatattcttttataaagttggaaacaagcatttaaaactctgaattaatttcaaaactgtctgtagaacttctggttcctctcaatatggtgacctagcatggagaggaaactgtatgagaggaactgtagaaaaggaaatatttattctgggaagtaacaataatgaaacaggctctcttgaactggtgtgttcttcctacagcctggtcagaaaagatttttgaggtggattaaatttggagaaaagctttcttttttctttcttccctttcattcctttctttttctttctttctttagtttaactttcacctcttttgttgccttgagacaataaatacatgccctggttgtaggagaagtggcagtaacagcccacaccagggctaagttagtgaagttcaaaggtcctgctatgatgaaatgccagtgaaaacagcttcagctgagtgagtgctgttggctatttatttctctgccttttctgtctctcaacctctgggtgctggtggattacaattaagtttgcattccaattctcccagcgctaaggatttaaaggcgaaactgtactttgacgatttgtctaatggagtagctacaaagcggagtaatcaacaatagttctttggttcttgggtcatttgtttattttctaatccttcctatccttggatttttaggcaacacctgagcgtctcataatgcatttaatagaagaacattccatcgtggatccaacttatatagaagattttctattaacttacaggacatttcttgaaagtcctttggatgttgggatcaaactattggaatggtttaagatcgacagcttaagagataaggttggttttataaggggcatgaaagtgattttaacccaaaattttattcatgaaacttttatagttgatagattacctgtttattatgataataagattcagtacacctaaaaaaattaatgaacctgaaccatcagtataaacattctctgcttacttttatgacagaatagcatgctaaaagtggacaagagccttaaaaggcaaaaactgaaataaagctctggtatagctataggttcaggaaacataatagttacatgagagtattttagaattttactgaaatacttgattgtttctggagatcaataaaacattttaaaacggatttaatattttagaaagaatattcatcaaatacatttttttaagagggcagattgcttttaagcttcaaaatgggaatatttttattttcttgagttacagacttcacaatcatttgaaaacaatttatcaaaccttaatatgtctctcctgtgacttatttaaatctaccttttgagtatttttttgtattaaatgttgttcactattttaaataaattagcttatttcatgggatatgtttgcacatttaatggaaagactagtaatacttccacaaattggtaagaaataagttgtttcaagaaaataaaagtaggatcataattgtctggtgtgtctttttgagttatattttaaaggaaataaactggttgcaggtaaactgcagaattcttttatttaggagactaacatctaaaactacaggcttgcacacctctcaccctttttcttagaattaaatatatttaccttggttgccaagaaaataaaggcatgctttggaaatgaacaagaatatgatttagtgataattatccatatgcaaaagaatgaaaatggattaccaccttatactataaacaaaaatgtacccaaaatgggtcagagacagaagagctaaaactataatgccttaaagataggggtagattatcatggccttggatttggcgttggtttctcaaatatgaaaatatgatacccaagcacaagcaacaaaagaaaaaagagataattggacctcatcaaaattaaaattatttttgcatcaaaggacactgtccagaaaggtaagacaatgcacagaataagagaaaattatatatctgataaaggtttaatatccaaaatacataaagaacttttacaactcaacaacgaaaagacagcacagtttaaacatggaccaaggacttgtatagacatttctccaaagaagatatgtaaatggccaacaggcacatgacaaagatgttcagcatcattaatcatagagatatgcagtcataacctcaatgagataccactttacacccactaggatggcttttaaaaagggggaaaaaagaaaaagtaacaaacattgccaacggtatggagacattgaaccctcctccccacccccaccctacacacattgatggtgggaatgtaaaatggtattacctctgtggaaaaaacagtttgagcagttcttcaaaaagttaaacatagggttaccatatagcccagcaattctaatcctaggtaaatacccagagaattaaaaacaggtgtgcaaacgaaaacttgacgtaaatattcgtagcagcactattgacaatagccaaaaggaagaaatgacccaaatgcccatcatggataaacaaaatgtggtatagccgtacaataaaatattattcagccataagaagaaaaggagtactaatacttactacaccatgatgaaccttgaaaacattaagctaagtaaaagaagccaatcacaaaaggctaggtattgtatgattctatttatgtggaatagccagaacagacaaatagacagaaaagcagactagtggccgccaggggctggagagagggcagaatgggaagtgaaagcttaatgagtttgaggtttacttttggagtgatgaaaatgttccagaactcagaactagacagtggtgatggttacacagtattgttaaggtactaaattatgaactttaaaatcattaaaatgatgaattttatgtggattctaccacgatttaaaaaaaatgactcatttcttacattgttaggcatgttattcaaatcagcttacattcgttaatttttaacttttctgaagcaaagtaaacgattctgcagtttgaaaatttacagtgtttataatgaaagaagtttcagatttgtaagggtttttgttttgttttttaatttttatagagacagggttttgctatgcccaggctggtctcaaactcctggactcaagggatcctccttgcttcagccacctgagttgctggcattgcaggtgtgagccactgcaccagactcagatttgtttttgttaccgttttggttaaacatgttcttgaccatggaaacgctttcggtatggatttttgattgataggattgcctgctttatgacatgaagtttgcattttaaggtgctacctgaaatagacattctgtgtacttcttttatcttaacaaacaggcttgtgtcttctcactgagtggacagtgtcctggctctgttacttctgtgcacagggaagcaaaagctcaaattaaaccatgcctttctgttagaatgagccttttttacacaagggagggaacaagagggttgtcagttcttcatgagttttagacatgcttttggaatccacttgtgcagaaggaatgcctcttataaccatatgctgcctcttttatgtttccacaggtgacacggattgtattattatgggtaaataatcattttaatgattttgaaggtgaccctgctatgactcgatttctagaggaatttgaaaaaaatctggaagatacagtaaggctcaaaataatttctattcttcagagtgtagtggtcccccctcaacactagcaaactcagaacagcaatagctttcattctttcctgtgtcttaaatgtccattcttagaacttccgaatctgtattctagacttttgttcatttattctctgccacctcaattaaaacaacatttacactccttcctgactcttccatttattttttatttatatttatttatttatttatttattgtatttatttgttttttttttgagacggagtctcgctgtcgcccaggctggagtgcagtggtgcaatcttggctcactgcgacctccgctttccaggttcaagcaattctctcctacctcaacctcctgagtagatgggacttcagacgcgcaccaccacgcccagctaggttttgtatttttagcagagacagggtttcaccagattgcccaggctggtctcaaactcctgacctcgtgatccgcccgcctcggccttccagagtgctgagattacaggcgtctgagccacggcgcctggcccaaatcttccatttctgtattgacattcttatctcttagttactcaggcttataaacctggtgttatatgtgtaccctcagtctctttttcttgaattccctggccaggatttccagtcagttgctaaagtcacctaggtcactgatttagtcatacacatgtatgttcacatattttcttatggtctctctcagccatttcttttttactccctagtttaggacttaattatttcattatatctgatctattataatctgctcactgaccctagttctagtttctcttctagttcattctgtgtggccaaaagattgcttttaaaacacacatgtgatgactattattttctttgtcagtaatctatacttcctaccaaagcagttcctcacccatatattcaggtcccttgcctacctttttgccctttttcctgtgtaccctagattatagccaaatcagactattttattttccagttctgcatccagaccatgctagaattttcttttcctcacctattgaaactctgtttcactatcagtgcatatcctaaatatcaaatctatattgactttctaggtttcctttctatataggattcatctgttctaaatgtacagcacctaagataattccctccaagtccacagtagctgttcgtgaattcattttaaactccctgtcagatataaaactttgagctgtgacttggttgcctccttcaagcaacttgaaattttaggaaataagtagtaatgcagcatagtgttttaggagtacagctcaagctccaccatttgctagatttgtaaactcagacattgcctgatcttatgccttagttgtgttatttgtaaagatagtagttcctagttcattgagattgttgtaaggattataatgagctgagaggcataacagtctgtacacaaaacctgtgacatagcaaatgctcaagagctgtaattaattacttacagagcataagtggattgagttgaatgaagtgggaaaaattggcaaatttggtccctttcattaccccttggttcctattgacttctcggcagcacatgtgctctatacaaaatggggagagtgaacaacactgggaacttgattaaaaggttatagaggtactccactatcatttgagtcatcctgtgttggctttgtaaatattcaagggacatcagaatgtgggaaaaaaagtcatgggatttttttttccagtaatcagttagccatcaggtattcattgcattctactttatactcaaagacatcaatgtaggatcagaacaaatgtaagacttggtgtctgctttaaaaaaaaaaaactttagctttttgttatggacatgagatttgcacatattaacactatttgagataattgaaactggaattagaactggtagactattactgagtttaaggaagagctaaaataatacaagaaggaagtcttttctggacgagatgaaaacttgaatgtttctttgaacattggacaatatttaaaaaggtggttcaagttgttcaaggttttgaataaaggttttaaaagattctggttttatataacagccaggagataagcaaggtgggagtagagtgtgtattaggaaaagtttaagaaatgataagtaggtcgggcgcggtggctcatgcctgtaatcccagcactttgggaggccgagacaggcggatcacgaggtcaagagatcaagaccatcgtggctaacatggtgaaaccctgtctctaccaaaaatacaaaaaattagccgggcatggtggcaggcgcctgtagtcccagctactcgggaggctgaggcaggagaatggcatgaacccgggaggtggagcctgcagtgagtcgagatcgcgccactgtgctccagcctgggcgacagagcgaggctccgtctcaaaaaaataaataaataaataaataagtaaataaataaatgataggtaattttttgtcatctctctgtaaatgagacatcacttggaaatctacctatgataatttaaaagtcttataatcatattaagaaatcttgttgagagtgctttggcgtgggagtgcccccttcttcaattttgtttacctcagcttatacatgtatatttataactctaattctaataattttcgttgactttttaaaaacctataggaatagatacatttatatacatttatccttttctgcttaacagaagatgaatggtcatctccggttattgaatattgcctgtgctgcaaaggctaagtggagacaggttgtgctgcaaaaggcttcccgcgagtcccctctacaattcagccttaatggagggagtgagaagggatttggtatttttgttgaaggagtagaacctggtagcaaagctgctgattcaggactgaaacgtggtgatcaggtaaggaaataaccaaccacttatattcaagccttcttaaaagtattatgcctgctgcttttgttctcatcttccagaaagcatgatcagtttaaggaaatatttttctgagcctttttttagaggtagtatctgcatatggtttatttttaaaagtatttgtcatatatttattacttttaatggaaaatttggtgtagtatggccagaaataacatggtctactgagctctatcaacatgacctcctttgaatgggcctgcctatccttcatggattaggaaactgtataagctggcaacttgagaatactccagaacgatcaatatatgaattagcacccttgcaggttttgaagaagacagcacttctacctcatagtactctcaaatgtaagtggctgcagattactgaaggttatggtaatcattaaattatgttcatatggtaacataactatatccataagcaaagtgagccaaatgggggactaggaaaaaagacactcttaggaatttgatggtgatttttattttttggtataggcattaggtaagtatagagcagcctattccaaatgtgatctgctggcaactttgttacataaaaaatgtaattctcaggcttctctcaatcctgttagtcatattgcccacattcttaagcaatgatgtctgaacatctgtatttttaacaaagctctctagatcagtggtccccaacctttttggcaccagggaccagttttatggaagacagtttttccacggaccagggagttggggctggggtgatggagatggtttttggatgaaactgatccacctcaggtcatcaggcattcagacattaaattttcataaggagtgccctagatcccttgcatttgcagttctcaacagggttcacactcctatgagaatctaatgtcactgctgatttaacaggaggtggaggtcaggcggtaatgctcactggcccactgctcacctcctgctgtgtggcccagttcctaacaggccatgggtctgtgtcctggtggttggggacccctgctctagatgattctcatgtacttcaaagggtggtttcccaaatctgcctgatcatcagaatcatttaggaaacttgctttctccccatttaaaattttgttctttcattttagaatgtggctttattttaacggagccatgttatcattttttaaaaattatgagctcattcatattatgaaaggttctacactctagaacagtggttctcaactagtggcaatgtctgcagatattttttattattatgacttggggattattactggcatgttggtggacagaggccgaggatgctgctaaacagcctacaattcccaggacagcttccacaatagagttttctgggcctgaccccagactactcattaggaatgtctaatagctagaatcctgtaatcagtatatttattgttcagttatttgtatcacagacacatttaataatctaattcacacacacacacacacgtgaaatcattcttgagaatgaaatttatcatgcttttacttcttccttcaatcttcccaactactgttgaaatgatctgagattttagatctacattattgttactttttaacattatgtatcttctgtttcaagaaggcttttgatgtttgagttaagtttcataagcttttaaacaagcatttagacatttacacctgcttaactgatttcattgatcacttttatttcatttgcactgtatatccccattatttcaactcatttcacagttgtctttggtacttcttttagtacttttttaaggaacagatgggtgatacagtattatatgttcttgccttcctgaagatacttgtgttcaatagagcgtaacatttttttcccacagtgacttttccctcagaatactaaagtcacagaaagttatcacatcaacttaatgttgcccaagagaagtccaaactctttgcgcttcttttgtaggtacctttgggttatcttcccacaatgatgtttatagattctttattctttcttcttggaacaaagaaatttcattgggatatgtttttaaaaatagatctctttttattatttttgcatggtactagatgagacattttagtgcatagatgcaagtcttttttcaactctgggaattttacttctatggaatttttttttctttccctaatattttttcactctttttcttatcctttagaaatttttatgttgatcccctagatctgctctctgttctgactagtttttgctcattatatctttttatccttttcccttagaatcagtacttcttgaaataaactgcttctatgattctgaggtatagccaaattggggaagccctcttgtgaagggtcagcagtgtttacctggaagaagaacccatttcagttgtgcttcttgctgtttggctgcctgattcaatcagtggcagaaaatcatattaaatatatttagagtactccctttaaaagaattacctctctttgaaattcagtaaatttacattgagaatatttgacaaatttgtatatacatttgcaggcaataatttttatgagctgatctgccatgattaaatgttttcctttgtaaaccatctggtgtgggtattttttaaatttcctcagtatgatcccagagggcattaactgtcaaaaaaaaaaaagtttatagtaaagaatttggaaaatacaacaatatagagaaaaagaaaaacagtagtccagcttctcacagagataactgttgttcacataggagtacattttattcaagtttcattttatttattcactattaaacttttaaggttgtaggagtaactaatactgttctgtattaatttgtattttttaaatacttttaagattatggaagtaaatggacaaaactttgagaatattacatttatgaaagccgttgaaattttgaggaataatactcatcttgcacttactgtgaagaccaacatttttggtgagttttgttgtaaaaattgcctgaactctttcttcttaatttggtaatagaaaagtcattacagtggaagaaaagatagtaaaatataaacatgtttttgtctaagctcttcagctagtttcagaatctttagttttgaactattatgtattctagaattttcatttttcattatgtttttaattattttgatagtaagttttaaaataggtgtacagctaccttcagttatttatgaaattcctatggagcgtgtattatgtactctgctggagggatactgaatgaaatatagaatgtccggaataaaactaagaagtcataatcaggcattttttcccccagctagtgtgcaaattagtctacttctaatctttaagccagctttctgaagtaatatgaatgccagattagctgttttatgggaataaactgagtaaagcattgacttaagtacttagtgaattacagatttctaataagagcatactctacctttgtgtggaaaaatgattacagtgcctctgttgtgtttttatcatgtttatatttaaataaaaccagtgactaagctcatacttttaaccaaatctactgtgtgtttttttaaacttttaggaaagatttaatgtgatttgattgccttagacactttaggatttttcagaaattctgaaaagagtaacagtaaaaatcatatagcaattgaaataacaaagaaactttaagagtccttatgaagtagggaggaaaacaaatctctctaggttttttaggttacaatttgagaagtaagagttggctttaaaagctatgcctacggaagggaagtgtgagttttatttttttcactttggctttttatattgtgcttagtcataatgaaaaatgaaacgtggggtttttcctctttttgagtccctttgactgaattacatcatgttaaatctggtaaactgtcaattggcaatttagtattatattactttagcatagaataagtaagtaagccttcagaattttttgatttcctggagtttcgactaatatctagaaatgccaacttttaggttaaatgaaagagatttccagtttcgaaaaataagaaagcaggacttgctctcttactttgagcaaattatttagtctttccaagcttcagtttctctagcactatttcctaggtttcttctaagtatctaatacctttaaaccttttgtacccgtcacataaagattactaactggtattaaatattctgaataaaaatacagagatagtgtgaacccccatgaactctgggacacagaaaagtagatctgaaggatgcaaaagacagaagccataccctcagaaccctttgagtagtgggaaaacagttggccaacagaaccctaggttggatatagcagagggtagaagttacatggagctgcaaagggggaacatagcagtcacctctttcttccttaccctaggaggaaagcaaaacaccaaggagaaagctaaatacctcatgtttagatttagaaaatgcacccagagaagaaaacagctggcaatctcagtttactctctttctattctggaattttaatttatctattaaattacaaaggaatatttgtaaaatatttgtagaaatggagcattttactctagatgtggtgatgcccctaataaagccctaataactctggcattaccatgaaatagagttgagcagttaggttgtcctgtatcaaacttacagtgaggacacctacaaaaaggaaacctgtgaccagaagacattggttcagtgatactgagaggtgaagccagctggacttcctgggtcaagtagggactcggagaacatttctgtctagctagagattgtaaacgcaccaatcagcactctgtaaaaacacaccaatcagcgctctgggtctaggtaaaggattgtaaatgcaccaatcagcactctgtgtctagctaaaggattgtaaatgcacaatcagcactctgtaaaaacgcaccaatcagtgctctgtgtctagctaaaggattgtaaatgcaccaatcagcactctgtaaaatggaccaattagcactctgtaaaatggaccaatcaagcactctgtaaaatggaccaatcagcaggatgtgggcagggacaaataagggaataaaagctggccaccccagccagcaggggcaagctgccagggtccccttccaccctctggaagctttgttctttcattcttcacaataaatcttgctgctgctcactctttgggtctgcaccacctttaagagctgtaacactcgccgcgaaggtccgcggcttcattcttgaagtcagcaagaccatgaacccaccggaaggaagaaactccggacacatctgaaggaacaaactccagacacaccatctttaagagctgtaacactcaaccgtgaaggtctgcgtcttcattcttgaagtcagcgagaccaggaacccaccggaaggaaccaactctggacacaatactagaacaaaccattctcagtccttttattacttaaaactgacgatcagggatcaccaagcataaggagaatcaggatcattgagagggtgtggtagagacctaatgagtgatcttatagattctggagaaaatatttaaaggagagaagaaaaacatttctaggacgctgcacagagcaatttaaaaatttatcccttgagaggcagagcttgcagtgagccgagattgcgccactgcactcccgcctgggggacagagcgagactctatctcaaaaaaaaaaaaaaaaaaaaaatttatcccttgaaacaagaacaggatattaggaaagaataaacaacaatcattgagaaagaagtaactcttacagacaaaaacatttgtttgaaagaatagataataaagttgagaaaaatctcccatactatggaacaaaaagacaaagtaaaattaagctctattccaggatatctaaaagaaaatgtaaggaagaagatgtttaggaaataatagcagagaatatcccagagtaaaagaaggatgtgactctcgtatttcaaaggcctcactatgagctgaggaaaatgtattaaacaaaacttgtgtcaactttctacttccagtattgactgaagacaacttaaaagagctagactaaatatgaaaaactataaacaaacataacaatccaaaaagatagtgaaaaactctggatgtgtcaaagccttttcccactcctgggaccatatcccaaagtgatgtctctttttccagggccattttcccatccgtagaataaaactgagaggagctccttgataaacttacaggtttgtagtttagtgcccaccaaaggataaaatagtagcattacaacctttgttaggattgagactttgaaaacctctctctgaagtggatgtgcgctgtacctaactgaccatctaggtgaccaagaaaaacttacagttttggccctggacttagattataggtgcctgacaaaagaaaataaatatgttctttagaggatactaacagcaacttgttatttctaaaaataattttttaaaaacagagtcaagcaaagattatgaggcactcttaaaagtcagtatgagccagaaccaacagaaacagaagcacagttgctccagaatatcagacacagattttaagtttgctatcttttatgtccatgaagataaaaatcaaattaagtgttccatttccagataagatggagtaaacacacaccacccttcatctctcactgaacttaatagtaaacctggacagaatcatgacccacttagctgagaactctgaaaagcaaatagcaacaggcaattcgcagaagaataccataattcaaagtaccactaccagcaatgaattcactattattttaattctagtatgccctaggttggactcaaggcaacctaaaacctggatgtgagtactgtggtacagacagagatccaggagaagcctggcttgaggaatgagaaaagggaactcctactaatagcagttgtcctgtggagaaaagtgacactgcttttaggcttcattgaattctagttttcatgcaagtgctcacagccatctaaagttctctctctcctcgaagagtccctctacctgacccacacctcatgtttagatttagcaaatgcacccagagaagaaaacagctggcagtctcagtttactctcttcctatcctggaattttaacttattcctcttggcttccacagctttctaaaatctttaaaaatcccacttctagccaagcatggtggctcatgcctgtaatcctagcaatttaggaggctgaggcgggaggatcacttgaggctaggagttccaagaccagcctgggcaacatagtgagacctggtctctacaaaacactaaaatttagctgggcatggtagcatgcacctgtagtcccagctacttgggaggctgaagcaggaagatcacttgaacccaggagttcaagactataatgagctgtgattgtgtccctgcactccatcctgggcaacgagcaagactctgtctctaaacccaaaaatcccatttttcagataacttgtctttttaagttttaataaaagtagtaagtgcatatattttgaaaactaaaatactaaaaatagatatacaatggaaccatactgtgtacaatattctgtgctttttcacatcagttcatacagacctacttgttatataatttttattattacgtagaattctattattaccataatctgttgagttaatgtcatattgatagatattttagattgtttatagtttttgctattaacagagatataataaaaattctttgtacttttatgctcatatagatccacctatatgatacatttctcaaagtggaattacttttgacagacactgcagggttttactttctgaaagtttatcacgatctatgcttcattcatcagtgtataagaatgtcttggccaggcacagtggctcacgcctgtaatcccagcgctttgggaggcccaggcaggcagatcatgaggtcaagagattgagaccatcctagctaactctgtctctactaaaaatacaaaaattagctgggtgtggtggcatgcacctgtagtcccagctactcgggaggctgaggcaggagaatcacttgaaccttgggggcggaggttgcagtgagccaagatcgcaccactgcactccagcctggcaacagagcaagactctgtctcaaaaaaaaaaaaaaaaaaaaaaagcctctgcagtgggtataatcagtcttttaaattttgatatacattatttaataacaagtaaggttgagcaccttttttgtgtgttttggcatttcttttctataaagtctttttttttttttttttgagatggagtctcgctctgttgcccaggctggagtgcagtagcacgatctccactcgctgcaagctccgcctcctgggttcatgccattctcctgcctcagcttcccgagtagctgggactacaggtgcctgccaccatgctaattttttgtattctttagtagagacggggtttcactgtgttagccaggatggtctcaatctcctgacctcatgatccacctgcctcggcctcccagagtgctgggattacaggtgtgagccaccacgcccggcctctgtaaagtcttgacttcatctgcccctttttatattgttactcatcttttattgacttgtttgaccactttataaattaaaatagtatctttcaactctttttaaagagttgaaaagttgaaagtattttccctaagtggtttgtgttttgacttttgtttcgtgtgtttgtgaacgcatatatacatatgtgggaagagacatttttaatttttatgtagtcagttttattaagcttttatagattctttggcacttttacttttgattcatgtacaatgtctgatattgctgtttaatagcattgtagttatgtgtactcactatcctttcatttttgtccctattttttttaatttaacgcaatcatttctcttctttaaaacaagctacaagctccacaaatttttgcttataattacatactcatgtccagtggagaaatttaacatttttttttttttttttttgagacagagtcttactctgttgcccaggttggagtgcagtggctcgatctcggctcactgcaacctccgcctcccagggtcaagcgattctactgtctcagcctctggagtaactgggattacaggcatgcgccaccgtgccccgctcatttttgtattttcagtagagatggagtttcaccattttggccaagctggtcccgaactcctgacctcaggtgatccaccctcctcagcctcccaaagtgctaggattacaggcatgagccaccacacccagccaaatttaacaattttaaaaaataattcagttaccttatatacacactactaaggaaatcgccccttcaaagttttccttttgctctaacagaaaatttcaatactttagcatagcattaactggcctcatctctagcttgttctctagtcattttaattttcttgaactttccttctaccacagggactttgaacttgagattttctctacctaagattactcatcctttgcctagttaaaatcttctcatctttctgatttctttttacaagatgacttgcttaaggaagattgccctttcctactgttttaagtagttcctctggttatgttttatgcgtcttagactgactgtaagttccacaacagtagtaatatacaaacatcaagtgaagtgcctgacctatatttacaggttgacattttttgaatgaatgtctgaattttagatttaaaaagtattggccagtcgtggtggctcacccctgtaatcccatcactttgggagggcgaggcagaaggatcatttgagcccaggagttcaagactagcctaggaaacatagtgagaccacatctctacaaaaatagaaaaaatgagctgggtgcagtagcacatgcctgtcatcccagctacccaggaggcagaagtgggaggatcagatgagcccataaagtcaaggctgcagtgagctatgatctccagcctggatgacagagtgagacctgaccctgtttccaaaaaatgcatatataaatgtacatatatacatgtatacacacacacacatacacacacgtgtgtgtatatattaccatatggcttaaaatcaagtgaaatttgttaaatattttattttaatcatgcagactttatggaaggtaacttctaaaaagtctccatcattttgatagcagaaaaatgtgcttttcataaacttgcgctgtgctttggtaatgtggtatcatccttctgttgaaaccctcaaatcagtccagatttacaagtgaataccaagttgtaagtattttaatccattcttaaggctttatccatttctatcttacttgtaagttctttgattttgtgggaaactcttactttccttttctgtcgttttccaaaaaaattctctgtgattggatttttcagtgggcatatttacacaatttacaacttaaaaaataaaaaaaggtgcagcatatactgctcaaagctgtatgtaatgataagctgagtgtttgcttccacagctcatgcagctgaagccatttaagtctattctaagaatatgcaaccactgtttctctgtaattcagacttcttcaggcaccatgactcatcatttctagatatttaaccttatacagatttatctttgctttatcccaaggagatgtagccatcctcacaaggcaaaaatttggtgtaggcaaatagattgctaaacaggtaatttcccaaatgtacctgcaccctcattaaggatgaaataattcaccagacttagttagacttgatagaaagatatctgaggccgggcacggtggcttaacgcctgtaatcccagcactttggaaggctgagacgggcagatctcttgagcctagaagttcgaggtcattcctgggcaacatgtcgaaaccccatctctacaaaaaaatacaaaaattaacccagcatggtggcacactcctgtaatcccaactgctccaagaggctgaggtgggaggatcacctgagcttagggaggtccaggctgcagtgagccctgatcacaccactgaactccagcctgggcaacagagtgagaccctttctcaaaaaaaggaaaaaaaaagggccaggcatggtggctcacgcctgtaatcccagcactttgggaggccgaggcaggtggatcacctgaagttgggacttcgagaccagcctgaccaacatggagaaaccccatctctactaaaaatacaaaattagcctggtgtggtgatgcatgtctgtaatcccagctacttgggaggcaggataacctcttgaacccaggaggtgaaggttgtggtgagccaagattgcgccattgcactccagcctggacaacaagagcgaaactctgtctcaaaattaaaaaaaaaaaaaagcagtatctaagatatgattggttgttacttgtttttacttcagaccactgaagtggatatttttttagcagctttactgaatgacatagcctcataaatgtgaccgtgaggaatcgatatatattaccaaattaaaattaccaaaattaggccgggcatggtggctcatgcctgtaatcccagcactttgggaggccgaggtgggcgaatcacctgaggtcaggagttcgagaccagtctggccaacatggggaaaccgtatttctactgaagatacaaaaattagccgggtgtggtgatacatgcctgtaatcctagctactctggaagccgagggaagagaatcgcttgaacccgggagatggaggttgcagtgagctgagattgtgccactgcactccagcctgggcgacagagtgagactctgtctcaaaatcagtcagtcaatcaataaccaaaattactgcttttggtaaaagtaaaaataaagtccagcaaagcttttctcatctaaattttacaatctgaacctgactacagtagtgaggtctcatctcaagtgacatatgtagttatccctcggtatatgcatagggttggttacaggacctccaccccatgtacacccaaatttgtgcatattcaagacccacagttggttcttcagagccatacgcaggtttttgcatcccaagaatactgtattttcaatccacgtttggttgaaaaaaattcaagtataaatggacccacatagttcaaactggtgttgttcaagggtcagctgtattataagaaataacataaaatagaacctaagtatctgtttctataaaattagttgattagcagttatgttacttattacctaaataggaacctctgttttttttcaaacttgcctgcagcctgcccacttcctttccctttccccccactgactttccttttattagtgttgggcaacatcagaagtataatcaggtataaaaactaaagaaagaagaagatatagctgctaaaggacaggtaaatacttgacagtgtttagttgaatgagactgagaaagttcaaataatggaaagtcactgtgtttatccttaaaatttgttgttggtataaaaattttctgaagagaagaaataaaatgacgcatttgttttatttccacagtgttcaaagagttactttttaggactgaacaagagaaatctggtgttcctcatattcccaaaattgctgaaaaaaaaagtaatcgccattctatccagcatgtgccaggagatattgaacagacatcacaggagaaaggaagtaagaaagttaaagcaaatactgtttcaggtggaagaaacaaaatcaggaagattttggataaaacacgatttagtatcttgcctccaaagctatttaggtaggtaatgccgatcttagctatgcaggaattttcatcttcactgtaaagtttttatttggggtggggggaggcttgggtaagttttgctttgttatataactaatgtatcataaagtcttcaaacagtactcaaataagaatacatttgaacttctccctatcactttcatgaagttactactttcagattatataatagcattattttgaattttgggaaagactgtccattttattttatgaaatccatttttaaatatttttggtccacttttagtctcctgatctctacaaattgtacaccttaaatcttgggacttattcaccagttttttttttttaatcatttttcctttgcagcaccatttattccttcttgaattctaaagttgaactttttaatcagacctatttctatttccaaaatgggatatcaccaaaacttagtaatacttgaagattttaaatgtaaattaaggtctgtaaaatactgatggaattagtccactaaagtgtcatgattggcgatgactctagtatatattacattagcagcttcctgaagcaattacaaaagttctaatcaagagcagtacaatacttagcacatagtaggcactcagtttatatttattgaataagttaagacagtgaataatcagtgaatgaaataaagcaagttcaaaaaatacattaaaagaaaatacttacttgcctcctgaaagttcctggtaattgtgccagattatagttataggaacaaaaagggatggtccttacctctgagaaattcacatcaggaacccttactctgtacacatttattatatactaagccagagacaggaagataaatagatcaaggttcttatcctccaagagttgataatctaagcaaattgcaaagttctcatgttacaggttgataagtggaggcaggaacaaacttgttaggtttgaatagattgtgtttctgtatatgtaactagagccagagcaagagaagtaggttatgagggaccttgaatattatgctaaagataatagacttcatcatgtcatgacagggagccataagaagacatgggatttgataagatctgttcttttaggaagacctctctgatggctgtgttagtgatttggggttgtggatacagcataatatagcagtgatagcagagagaacaattgggaggcaacttggaattgtgtcaactctcatctttaatgatagctatttttaaatattttttcaataattaaaaatctcgaagtttttccaatcagatatcctcatcttcctgagttcttatttccagtcagggaaacacattttctcctcatttaatttggaactcagaggattaaaataccctgagttttttctaaaagttcattactcattctatccttgaggtgagtggcttataaaaatcattactttaaaataccaaaattttgaatgtcaagtgtactgtagcaaacactgtaagaaaaggcatggtctcacaaatggggatcgagtaaggagaatgttagaggggccagcccacactgaagaggtcagggatggttggggatgactggaagtcactgtgaaaaagggacaaaaccgaggatccagaaggcagaaaagaatgcatgaggagaattcctcagggggtaatgccctgagttccacttccagaagccttaatgggttttgtctggaatagatctttcttccattaactgcgtctcattttgaccagcgacacagttgtgacatgtatcatctaaagacagacaagactgtaattacaactctcttcaacttgttactatcacattctcaccagctgtactcaagttttaggcagctaaatcagtatctcatctccacattatcctttggtgagggtgtgggaattagttactgtacctgaattctgtctttggttacagcaagaggtgtaaaactgaggtcgccaggaacagtcagttgagtattttcaagcattataactttatattggtacccaaaaaagaggactatctggtaaaaatagttttgcttaaactcagaagggattattgggtctcttgctttgtgccaacaagaaaatgcttggttatgaatataaatatgaataaaatgctgcactgcagaagtttatattaacctgtctgtcccttccaaacatgtttccaaggagtaaaatgctaattatttcagccacataaatacagaaaaaatagtttatcttggaagtcaaaggtttctggagcctattttgttgggagagctgtcttacctatcagactggcctttttgcatttcggagaatgtatcttatatttcttgacagtcatctgaagtgaattcagacaattccttctgctacacaaaggtatactaccctttatatataaagagctctcagaaatcaaataggaaaaaaaaatcactaaaacttcaatggaaaaataggcagaaaacatgactcagatgatctatattgatattgatccaggatatacagtttaatactggataccatttgtttcctcacagattgacaaaaagaatggtcagggacagaattgaaaatgttataagtttataaaagtttagactggtgtgctaatataaagtgatgcctttctattaaaagctttaaaagtggcaaaattctggctgggcacggtgcctcacgcctgttatcccagcactttgggaggccgaggtggacagatcacttgaggccaggaggttgagaccagcctgaccaacattgtgaaagtccatctctaccaaaaataaaaaaactagctggacatggtggcgtacacctgtaatcccagctgcttgggaggctgaggcaagagaactacaaaaattagctgggcatggtggcacatgcctgtaatcccagttactcgggaggctgaggcaggagaatcacttgaacccagggagatggaggttgtggcgagccaagctcgtgccactgcactgcagcctgggtgacagagtgaaactccgactcaaaaaaataataaataaataaataaataaattttatttttagtagcgacagggtttcaccatgttggccaggctggtctggaactcctgacttggaactcctgacctcaggtgatccacgcgcctcagcctcacagagtgctgggattacaggtttgagctaccgcactagccaataaatattttaaaatgacaaaattatttgattcagtagttctgtttctaatagtaattagatgaagatttatatatagatgctccaagttgttttatctacactaaaagttggagcaccctaaatgtccaactacaaggattggttaaataaattctactacacatcagaaaaatgactagaaggaaaaatatcaaaatgttgattgtggtttttggaaggcatagtttcataggtaatttttcccttccttctctgctttctttctgtattttacaagttttcttcttgaacatttgttattttttaattgaaaaaaatgtttaatgagttcagtttcacaatttctgagcatctcctgtgtgccagacctctttggaagaggcaccaagaacagaaacttgttctctgcctttagcagcactcagttctgtaagagtagaggatgagttgtcatagaaaagaaagaatgtaaggaaagaacaaatacttgagataagaatagataattccaaaatcccaaacaaaccatgatataattttaaaagaatgttcctaaaaattaaagtgaaaaatgttactagtttgaattacatctgtaagttaagacggaagtatggtttttattgacctaagaattcttcacatttcaggaaatctgtttttcttttttaaaaatcacatagcttttattttgtttttaaaatcacagttgcctaagtaacatctctgtgttattcattgtaacaatcccagaaataaactgccttgcttgcttaactggaattatatttttcctccccatttcttgtcaacgtatttttgtttgctttttaaatattgggattctattttatttacatattggcgatatttatgtagcctttttagtttcataatatgaaaccaagtacttttatcctaagtaaatttagtgttggggaagtattgaggaatatttttaaacgatttttcttctgttactgcatcaccttctcaggagactgttttggtaagaatgatacaattacttgccaaatgggctttatcaactcagctttcaaataagcatggatattttgccaactaaatactgtttcattcatggcatagcatggattgtacatagcagtatagttttcatttatgcacctcacactttaattactacgaatttgtaaccagctttacatatttatagctatacagtgttttctctattgagcattcaaaagcagaagcgatgttaaatagcatcagcaagagatataaggacttttcgtattttctgtacatcttaatttgtatagtgattcagcttgctgcagttgatgcagttaattccctttaatagaaaattgtaactttttaacattgttaaagttgcttctacttaattattagtaggactggacaacctctttaatggtttgcttccttggattgttgtcgcaccctctgtgtccaaaaattgatgtgtttgttttcaaaagtcaattaaagaaagactgtttttttaaaaaatctttattttctgtatactttaaatacctttgaaagccctttttcctcttattttctcttacctaaccttagaacatttaactctaacctttaggaatacaaaccaaattataaggagtcaatttagagtaaatgcaaattatttatcaaatgagatatctcctttgctttatctgtcaaattagactgccttctctccccaggaaagcacttcctgtttctctagtacctttactcggacctgcctctactttttaatataaactgagtaaaataaataattctcccttctgtgtttgtacaattctcattttatttttatttatttattgttttgatacggagtcttgctctgtcacccaggctgctctctgcaacctctgcctcctgggttcaagcgattctcctgcctcagcctccagagtaggtgggattacaggcacgcgccacccgacttctggctaattttagtatttttagtagagacggggtttcgccatgttggccaggctggtcttaaactcctgactcaggtgattcacccacctctgccacccaaagtgctgggattgcaggggtgagccaatgtgccccgccctattctcattttaatttttgtaaaagtaagtccattcttaagaattaaagtcctgttttcctttacaccacaacattcgcctatattacctgatttttcagtattcctgggggagatagtgttgctcacatttacagatgagaaaaccaaagtttataaagagaacgaaatttgcctgaagtcaagcagctagtagctcaggtctgtctgacatcaaagcttgcccttgaaacactaatctttgctttcttccatgtctctttgcttttctctgactcttcagctctgtcatatcctggccttctctttcatgtctgactattaacagtcctttagcagtttatttaacagtctaactctccatcttgcatagttttctaatctacgtaaaatcctatattttacatctagtgtaatttaaatgtatttcatattattcatttataatactatactttaatctttttcatgataataggtaagtattctgtgatacttctgttggtatgtatagcaagtactaggcagaatgctgcatttgataaaatatagacaagaattaatagtaacagagcattggttttaatgtaagtacaacccttagaagtagtttttggttattgatgttgatggaaatttttttcactgctatcttatgtttttataggactgttttgcttaaaagtaagctaaaatttgggggtatctaaaacctaagtgacagtgtttgtttctttgtttttattttttctctaggtggatttagaagttgcctatgtcacatttctaaaatattttaaaggaagaatattttgtttgcttaaataattagacttgagagattaaataagaaataatgtacccttagaatgaactttagagactgtaattttcataattctattttttttctggtccagtgtttaaagaccactcttactttgtcacttgaccttggccccattgttatctattacctgccatagtttttggtttgaatgtagactctttttcctagaggatcaccaagattttctggagaaagggaaagagaaagagaacaccttgctatggtgtggctgtgcatatttggatacatgtattagtgtccactaaaactggcaaatttgaagggttccctaaatactcaggttcagtttcttcacccaaactggtagacactaaataagacaatttaattaggatgtagtagaattacttagatgtataagttagattttattttaatgtaattgttaaaaattttagtgccattttcatcattacaattgtcttttaaaaattgctgtagtatttcagttgtttaaatcacctctttgaattggttcttttatgccttagtgcacagggaacagaaacgtttactacttaagtactctcaaatactttaaagtgatatatgacattcttttgaagtgatggaggcctaagccaatcacaagatgacagcattgtgggaacaaggcactgtaggcatagtctggctataatgcccatccctggaacactctcatccagcagccctgatctcctgcagcctaccaccagtatgttggatttttccaatccttcaggtaattttcatatgtgattttatattgccgtattggtaccaaatgaacaaatagatggttaagccttgtgcagcaagtgctggagttacttgcagccctcttaactctagattatgacttgatgcaaaaaactaaagggagattgacttgttctgttaatttgaatggtacttcctctaaagtgaaacagaagtacataaaaaagagactacctctggccaggcgcagtggctcacgcctgtaatcccagcactttgggaggccgaggcgggcggatcatgaggtcaggagattgagaccatcctggctaacatggtgaaacaccatctctactaaaaatacaaaaaattagccagacgtgatggtgggtgcctgtagtcccagctacttgggaggctgaggcaggagaatggcgtgaacccgggaggcagagcttgcagtgagccgagatcggaccactgcactccagcctgggcgacagagcaagactccgtctcaaaaaaaaaaaaaaagaaaagaaaaaagagactacctctaaccacagaattaggtatcttttagtaatcctaatctaagcagtagaatgaaaacagagacacttctcaggcaagatatatcttacccagggtgtggaaaagaataagggagattattttaatctaagtggcctcacttacctttttctataatacacagaaaagtgttagtaattttgtaaaagcagatttttcctcagacacttgaagctgaagttgtatttgtcatgtattgttatcagagcgttatagcataattttcattgttgtttggacttccagtgtgggatgtcaagttattttttttttgcgtctattcatgtcttgaggcaaaaattgtcacagttatataatctaaagttttgttacaaagaagaaaactttcgactttgaataattatatatccatcacttaacggatttgagatggttttcaataaaaggcatatacaattaagcactgaaacatataattgggtccaaggaaaggtgggagaaaaaatgcttctacaaagataagcatagttctgattcaccttcaattttgactctaaagttcctagcagctagtgtagaaagggaggaaacttagttccatctcggtattagaaggaaatataagtacagtagtaaagttcatgttttattatagcaacttaaataaaaacctcaggacataacctaataacagtttagtgaaggtcattctgcacatggtttcttcctttatatttcagttgccacttaaccactagagcgattattaaacccagtaacctgttctggcacatcacactctctacatggctaccagtgttctttttagaacaaagatttaatgagtcattactttcctaagacatttgtagtgatttttatattagtgaaatgtcattcatgagacagaagacactccagttatttgatccgaagttaatgtgaagattgttaccaaagtataaagttaattaaactatttaccggaaagggtaaaggaagcactaagatatcacagaggtaagaaaactgcaaactggattcagttcttggcacgtaaaagaaatgtcactaccagggtgaagaagaagtgttgctgacctgaaccccctttctagcctcttgttctgtcattctctccccactattacttcaaccctccttcctgagtatggaatgaactttcagaatgccctttctttgcccatgtttgccacccatggccctctccttgcatgtccagtaagcttttttatttgtcagtgctgaactccagtgttacctcatctgggaaacccacctccctctgccacagagtcagtctctcctattgtttgctatgtggcaggatgggaatttatttctttgtctctgtgtgtgtgttttacagcagtgcttttcacactacgtagaacattcaaaaataaagtgtcttcacacttccaaagcacaaattaaatatatgctttcatgagacaagtattagggatcttatgatttgtagttttaataatttatatggctgtatgtttgccataggtatatgtaggatgtggggctgagggaataagggatagggttgtaggaggaggcaagagagaagtaagttggagatttagctggaggaacaaagagaagaggttgaaattattaagttttagaaactaagtccccatggagctgaaattcagacctataaagaaaaggtgtgttacttaacttgatttcaagttgattacataattctctccttgagaacatgtttaaaggactaaagataaagatgcctttttaaaatctgttcagagaacatctgatatgtctcagtctgcaacatgtgcttataccagtaatgtgaacacatatatgataggtatttaacttatatttttaaacccccaaatgtgtaattttgtgaaaggctttttatctagtgatggatattatttatatttggattgaaaaaaacatcaattcccagttaattccaaattcagcttcttatgtaatttatacaacacaaaaatttaaatgagccatgtacatcacatatgtatattataggacatgtgtaacagccaagtttgattaatgtttattggtcttgagcttacctatatttatccttcattttcaaagttattactagatcaaaatgaaagtgggggcaaagctacagaactgtaagtttgtttttgattgcttactttgattttgctttatttttgctgcatacagctgttggtttttattgtaagtatcttaaagactgtagtattctattgcccttgtttgtatgtattattttgttattttttaaaagtccaatgatacagaattgaatgaagtagtaagcacaacttttctttccacttagaaggtagccagtattaactggcatgtgtctttttagtcatttttttgaatatatatatgtttttaagtttggatggaatcagtatacatgctattctgtaacttctgaaatgttctttgggatttctgactcaatacaaaatgagtcctaaaaaaaattaggagtgtggctaagagaaatttgaaaaggaatttttttctatatctgcatgtagaacttacagcttacttcttttcacttaatagcccaaacccttaattgatttatttcatatagtaaacttaattttttcttcattgaaaattttttattattagtttttaattataaaggaacacagtcatagctttaaaaaaattaaactgccagaataagatagaatataaaagtttccactcctcagaatttagttattatttacttgtatatccttccagaaatttcattgcacataaaatgtgtctgctgttgctttcaccccaaatgagatgttttacttttcttccacttaactgtttcactttagcaatatacctttgaatacttttctgtttcaaggtgtgttgttctaccacaaatttttaaacagctaacagaatttttttaagcagtccccattagtagacatttacagtattgcctaatctttgtgttcacgtatctttacctgttttatgtatgcattattatattttgagttttgaaaaactattttgtgagaatttgttttctcattatataagtgcctaaaaaatatgtgttttgccatttgacctgcaaaacttaaaatgtttactatctggctctttgcagaacaattttttcaatccttaatataccactaccctttgtttttttgtgtggcgctttttgctgtatgaattctcttccttactcaatgtcttgtctttcgtcgagctcgtgtttactcacttgaatgtaagtaaattccctgagagtggaggcttaatctgtctcacttagcactgtagcttcatcacctggaaccctgttgacacataacaggcacttcataaatatttattcaacaattaacaatttaaagcagaatgaaaagtcagtctttttttttaaagatcatcttaaatacctaaaagttctcccatttttagtgtaatctcagggtcagtacatacatccttcaagtattcattttttaattttaccgctgtaagatttataaattagctctctagaaacttcatctctgattgaaagtctagatatcaggtttctatttaatttatttacctattacataagatttctacatatgaaatacaaaccttgatcctccaagatttttttttttttttttttttttgagatggagtctcgctttgtcacccaggctggagtgcagtggcgcgatcttggctcactgcaagctacgcctcccgggttcatgccattctcctgcctcagcctcccgagtagctgggattataggtgcccgccaccacgcccagctaatttttttgtatttttttttagtagagatggggtttcacggtgttagccaggatggtctcattctcctgacctcgtgatccgcccacctcggcctcccaaagtgctggaattactggcataagccactgcgcccgaccccaagatttttttttttgacagagcctcactctgtcacccaggctggactgcagtagtatgatctcggctcactgcagcctctacttcctgggcccaagtgatcctcccacctcaaactcccgagtagctgggcctataggcacacaccaccacgcccagataatatttgtaatttttgtggaggcgggcttctccatgttccccaggctggttttgatctcctgggctcaagtggtctgcccacctcagccccctaaagtgctagaattataagcatgaactaccgcccctggcttccaagattctttttaaatgtctgttttgcctttaaaattgtactgtatttttgtctgcattttagatttgtgcctaaaatttgaaatgattggatcattttttcccttttgattcaactttattcgaacatattgaccattcatctaagcgattaacatttgagtgtctgctgcatgccaaatattgtgcttggcatgtatgtggttttcctactaacaagaaacatgtttgtaaagaatagtatgtaatatatacgtaataattctaaaatagaggtttacactgtcattaatattaacgcagagaaagattttcctctgatggctctccattgcttttccaagttgacatttgttaccttggcagattcatcagagtttggattaagggataccctttagataatcccatttatgaatctgttctaaaggcacccatgtgtgatacctgaatcaatcttatgtgatcatataacaatttgtccttcacatggacaaatcactttaacaacgtatgactttgtaacactatgcagcaagatatacaattgtgtgctccttcccagaagatgttacagtatattggcagcaagggaagagaacatgaaatgtgtacaaattcccaccctgtctttgtgaataaatttctctgaagaaagtaataaaaggtatcagaacatctccccattccctcaaggtcagtcagtaccactggctaaggctcagcccccaaagatctagtaaaatgattcaattctggagcccaggacagctaggacctacttttatgaagagggtagcaacagtacaggtaataacagtatattgttggttccttttttatggacttaaaaagatagtggaaacccatttgttcagtatatttctcttggcaaattgaaatttccatttgtttgcaataatcttctagcacagggtagagaggtatattagtccgttttcatgctgctgataaagacatacccaagactggacaatttacaaaggaaagaggtttaatgcactcgcagttccacgtggctggggaagcctcacaatcatggcagaaagcaaggaggagcaagtcacatcttggatgacagcaggcaaagagagtttgtgcaggggaactcctctgtttaaaaccatcagatctcgtgagacttgttcactattgtgagaacagcatgagaaagactcacccccatgattcagttacctcccactggctccctcccatgacatgtgggaattgtgggagttacaattcaagatgagatttggttggggacacagccaaacctttcaagaagtatgtctgattttgatggatcttgaaacagtctgaccttaagtcttgtaggtttaaaaacctgatgatgtcagcagcccactaagtattggctcatcagaatgaaatctgaacaagatgcatttgatgactcagatttcttaatacattgaggaaagagagtttgatgcatccttcttacagaaggaaccagagtagatgaagtattctactttcaacttgagaggacccagaacattcaacatatgttggctaagactccttgtccctggaattatattcatgtatattcagttgaatctttcagtcctcagagcaagtctttttttttttttttttttggtcctcagtctcaagaggaccaaaaaatttattttatgaaaatatttcctgccatatctgtatctgttccatttctcccttttaaccagggattatacctcaggacattttgagataaatttgtaatttgttttgttttgttttgttttcctctaaaggctaacagtgtccataatgctaagaaggtgatgctggacaaacagtataattacttgagcccccaaaatcttccatcctgcccccactgcagtcatcacacacatacaaaaaagccacagtaatatatattccctaattctttttttcttttttgagactgggtcttactctgttgcccagagtggagtgcagtggcatgatctcagctcactgcagcttcaacctcccaggctcaagtgatgctcccacttccacctcccgagtagctggaactacaagaatgtgccaccacacccagctaatttttaaaaattttttgtagagatggggtcttgctatatatccaggctggtctcgaactcctgggctcaagtgatcttccagccttggcctcccaaagtcctgggattacaggtgtgagtcatacccagcctgtattcctaatttttttaaaaaggaaacttttgcaacagtaatttattgtcatagggaaaatttttagcatttgttcatgctataaagtcacttttcacttaaatttaattatattaaatattagcttatcatgttgaacattggtccagagttctataatgacaaaaagaaataagatagaacaagggggggtggaatattattatttacatgtgcttatcatataaacattgtctcaaattagaatttttctactaatagcagaaatcacaagggcaaagactaagatttcaccaggtgaacatttaaaatgttcttgtgttacaaataaataaaatatggaaactaacattttccacttcatagttggactaagtgttgttatctactacaatacagcaggaaaaaaacataagggataccaaaaaatatttttaaaaagacataatggttcattaaaccattatcagttactgagtcttaccagtaaccaaagaaatgaaaaaataatgatatttttttggagggaggaaaagaatagggcttatgaaatgggaaagcaaaacaaaacattaatatacaatttttgtaaggatgtgaccaaatttgttcccttacactctaggattataaaatattataacgtctctggagaacagtttggcagtatatttcaaaaaccttaaaagtatgcgtgccttctaattcagcaattctgtttttgagaattttcacggaggaagtagattgcctgcagaggcttacttacttttgacagggggtaacggggcatatcataatgtcatttataataatagaaagtggtaagcaatctaaatgtcattaggggtttggataattgaaatatataaaatacatatcatggagtactatgtcttcattaaaaatagttttgtagaagaatataatggcattaaaatgttttataagatattaaatgaaaaaattctggcttccaaaccatatatatagtatgagcccaagttttgtttttgggtttttctatcaatgatttgttatctgaaaaaaaaaaaaggatatatttatcaataaatgcaacagtgacttctgttaatattgtgaaatagaaatgtatatttcagtgttcagagggatcactgtgtttcacgttgctttttgaagggtttaaaagtgatttttttaaaaaataacaaagcatatctttctatttatgtagatatccctgatcaagttataagagttttcaaagtggatcagcaaagttgctacattatcatcagtaaagacaccacagctaaagaagtagtttttcatgctgttcatgaatttggtttgaccggtgcatccgacacatattctctctgtgaagtttctgttactcctgagggtgtcataaaacagagaagacttccagatcagttctccaaattagctgatagaattcaactcaatggaaggtgaataagcttattagtggatgtgcttatttgtagatgtgcttttgaagatttcctgttaaaacagctattgtaagtagaaacattatcatgttttagtgctcctaaattcactccagaagacgcttgataaaatatcttgtcactcctgctaaaataaactcttagaaccactgatataatctagttcctgtttttttatagaggaagctgaatgatacaaatcttcatatatatctgaatgactgtatctactaatttataaatttgtttttaatatggccagtatgtactttggcaaaagaagccatggttttcacagttctttttctaagtagttttcctttaatgaatatgcaggaaaattttaaaaattttaaaatgtgttctgaaaattatttaataaactagattatttctgtagtacatttgttccttactctggtttttttttttttttttgagatggagtctccctctgtcgcccaggctggagtgcagtggcgcgatctcagctcactgcaacctccacctcccaggttcaagcggttctcctgcctcagccttctgagtagctgggactacaggcacatgccaccatgcctggcgaatttttgtatttttagtagagacgaggtttcaccgtgttggccaggctggtctcaaactccttacctcaagtgatctgcctgcctcagcctcccaaagtgctggcattacgagtgtgagctaccacactcaaccactctgagaataatctttttggtaacccagtttcatatgtagaacaagatccctagaaagcttacagtgactgcatgccatggttgctgtgaaatgagaatgagttaactctgttttgctggctgtacatagtggttaagagcatagaccctggattcagattgcccacattcaaatcccagctctggctatgtgaccttgagcaagtcatatgtagcttctctacctgaatttcctcacccataaaatgaggatagtaatagtagaatatacctcatgggaatgttgtaaggattaaatgagttactaagtataccataccttataatgttaaacattattatatatagcataatgagtttcagcactattatttatggcattgtcttaggcatatgaacagtctaaaagcagaaaaaagagtttcttgacagtaaaaaatagatggatagatggatacaaacttaggcttaaatcaagttggattattagaaaagaacgaagtaaaagcaggtgatacattacctcgtttccttagtaacatccctgcacaagatgtttcctgtctcttacttttaagtgctgtagaattgttgatttaagagaagaaagcaaaatataggtcttaatgtgtggtaactgataagtgccacttgctggaatgaggttttgtatttaacaagggagaaaccattagtggaagtgtttcccctcctctgtagatttcattcctcttgcttcacttggaaatttatttaaaaaggaagtgagtggagtaacttctgaatagagatttttaaccgtcttgattcaggaatttattttgccttaattagaattcatgctattcataaacaaatatttacatagtaccaatcctctgtcagataaaacagtaagataaaagctttacgagggcaaggccagtacctaaaatagtatctgacagatagtttcataaaataattaagttcatgacataacaacattatttttactctttaatagatgccagttggtagaataagagacagacttctcaaaaatcttttcatttaaaatgttaacttttcattttatctgtaaattaatatttttggctaaaagttattaacagtaaaatgatattttacaacgacaaaaaggaaaagtgctcttatttaatcatatttatgaatacatttatttaaaaaaatttttccatttaggtattacttaaaaaataacatggaaacagaaaccttatgttcagatgaagatgctcaagaactagttaaggaaagccagctatccatgctgcagctcagtaccattgaggtggccacccagctgtcaatgagggactttgatttgtttcgtaatattgaaccgactgagtacatcgatgacctttttaagttaaattccaaaacaggaaatactcatttgaagaggtttgaggacattgtaaaccaagagacattctgggttgcctcagaaattttaactgaagcaaatcagctcaaacgaatgaagattattaagcattttattaaaattgcacttcattgtcgagaatgtaagaacttcaattccatgtttgcaataataaggtaagttggtacaaataggtacaaatgtctgtatggttttgtcattacatgcagctgattttctacttaggtattcaatgcctatgaaaagaaatgttcaattaatatgcctttattgaagtgttgttagatttaatgtattttccattttggtggtattggctttttctatttttgtttcttccatctttcttttacttcttttttgtaaatgaaagtgggtgattgccttctaatttttctttctctcccttcatctccaaccccccgccttgagtgattatatcatctttggatatgtgcccagtggctggtctttatcattagacttctgtactgtgcttttttaagtacctgcctcactatgatttgactctgaaaaatcacagtatggtatcagtactttgacctaaagttgctattttgaaacaacaacattgataataatggcaaccatttggtaagctcttcctgtttgccaggcactacatgaggttcactggatgtggtgttcctcaagcaagttaggctgttagaataataaaaatgttttgacattcataagcccaggaagtgtagataattacgtgagctctcccactcccttcttcccacttattatgaaaagttaattgtaggtaatttattttctgatctttatttagcacactgtagatcaacaaagggattcttcttaaaacaagtttaattttaaaagggagaggagttgtagttagctccatttttaaggccatgatgtgcttataaatcgcagcataattccacttgaactaatcctacctatacacatcccccacagaattcataatgatttgtttctactcctcatgtagattaagattaaaaagtagaatctttatagggactctttattcatgaccctgtcatggtaataggatgtgcctttattaaattaaccagtgtctacaactgaactgaacactctaggagtattgaatagagattaacagagtggtctttagaatcagctgcacctgtatttgaatcctgcctctcccatatagtagcaatgtgtcagtggaaaactgaagataggttttcttatctgtaaaataccacctatatcacagtttttaaacagctaagtctaaaacagaggaataaagatgccactgataaacacttggaaggctagaaatggaacctgtttgtaaaggaagcatcaagtaaagaatttgaaaattacgggctcagttttagagtccactatgaagaaaattgattgacactgagagaatagatctctgtataaaaaagagggtagaaagaaagtggtagaggtctaaaaaccataccttagtatgatgactcagtgtgagggtaaggaaaaagagtctagccaaagagatggaggatcagtacaagaaacagagtagcacagttatgatagtgtcatcaaagccaatgaaagagagtgatttgagagaagatgtgatggacagtagcccaaagaagggagtggataggaaagggctgagatttggttaagaggctttgtttggttaaaagatttgttttgttacaaagaatatttgttctgcacattttcatagctcatgtaaagatcattgctttgtttcttttgtattctttttaagataattgttttgtattcttgtacttcatgttcaggtagatcaaagaatatactcttttcagcagagatggcaaaggtgaatcattctgttctggctataattaacaactttttataattataaaataattttaactttttgaatagacatgacatgtacatggaaaaaattttaaagataaagagtacacagcgaaagtaactttgtctcacccagtccctaatccacccaaattcctctccccagagatactgttaccttttttcattcaagaaatactctatccatatagcaagcatataaatatatatttaaaaccaccttggctaatttttttaatttatcttggagattatttaaaatcagttcttataaagttgtctcatattttttaaacaactatgaagtactcctttgtattgtggagtgcacattatggatatttctaaatttccagactttggctatttaaaacagtgtgtggtgtttacttttgccatgtagaaatttttttatttttatgtagatgtattattttttttcctgctggagtttctgcattttgtggttagttaagaacaaagaattgcctaggtttgaatccagtgttggcacttgttgtctatgtgaactaagtttcctcatttgtcaaatgggaaatcctggtagttcctacctaataaggttaagagtattcaatgagctaatacaatgagagctcttagaacaccctagacaacattttttattaatcttgaattcatttttatgtaaacagtgagataaagaaatatatctttctttgttccaaatgacttcttcacccaacatcattaatcaatctttttttctaaaatatgcaatgccatctattatgtactgaaatctaacacatatttgggtttatgtctgcactcattgcttcattgatttgtctattcatttactgttttagttgctgaagtggtaaaataggttttaaggtctgatagggctagtcaaaccccttatgactctcttcatacttttctttggctatttctggcatgtttatttgtttcatatcaactttagaatcaatttatgtagttcttttaaaaagttttgttgatgtctgggcgcggtggctcacgcctgtgatcctggcactttggaggccaatgcaggtggatcacaagttcaggagttctagaccagcctgaccaacatggtgaaaccccatctctactaaaaatacaaaaaaattagccaggtatggtggcacatgcttgtaatcccagctactcaggaggctgaggcaggagaatcacttgaacccaggaggtggaggttgcagtaagccaagatcatgccactgcactccagcctgggtgacagagcaagactctgtctcaaaaaagaaaagaaaaagttctgttgatgttttcattgagattacattaaatacctagattactttagtggacatttgatagctttgtaacaatggctcttgccatccaagaacacttattccacttgtttcagttttcttttatttcctctgtggagttgttttattagtctgttttcacactgctgtatagaaatacctgagactgtgtaatttataaagaaaagaggtttaattaactcacagttccccatgtctggggaggccttaggaaacttactatcatagtggaaggcgaagggcaaacatggcgtgtcttacatggcagcagagagagagagagtgaggggggaagtgccacacttttaaaccatcagatctcttgagaactcactgattatcatgagaacagcgtaggggaaatctgcctccatgacccagtcacctcccactgcgtccttcccctgacatgtggggattacaattccacgtgaaatttgggtggggacacagaaccaaaccatatcagtttttatagtggtgttcatgtaaatcttgaacatttgtttgaatgtttaatatcttttattgctgttgtgaatgggatccttatattatgaatgggatccttaagttttctaatggtttctgcctaagtattctaatgcatatgaatatcagtgttgtacctagtaccttactgcattcttcatgcttctaataattttcagttaatattttgggagttttgagttaaacaatctaattttcttcaactgatgataactttacatctctcattccatttattaataactatttctctattttgtctattttcatctgctggtgcttcatattaaatgataccattgtccctcagtatctgtggggcattcgttccatggctcctcacagatagcaaaatcctcacatactcaagtcctgcagttgaccctgaggaacttgtggatacataaagtcagcattagcaggtttcacatccaaggaaactgtatttttgatccacatttggttgtgaatgtggaacactcagatacggaggggtgactgaatttattgaaaaaaatctgcatataagtggatccatgcagcagtattccacggtagcaggagttagccttgtatgtgaattgttttatcctttactttttcttagtaaatggagattgtggcagcattagggctgcttacaactcagagtgtctcccttctctcctgtctcaaacagatttgtaccaaagtgtatcactgtgtgctatgccaaataaaggattgttggcttggcatggtggctcatgcctgtaatctcagcactttgggaagccaaggcaggcagattacttgagctcaggaattcaagaccagcctggccaacatggtgaaaccctgtctgtactaaaaatataaaaattagccaggcattgtggtacacacctgtaattcctgtaatcccagctactcaggaggttgatgcacaagaatcacttgaccctgggaggcagaggttgcagtgagctgagatcgcaccaccgcactccagcctgggcaacagagcaagactgtgtctcaaataaataaataaaataaaggattgttgtttttaacctcagggcagaaagagttctgctttggagaactgtttgtcagctttcattggtatcttcagctgcagacattatttgtcatcagctttgcttactcctgtttgacctcgactattttttgacaacctttctagtgtgttgaggagtttgttatcttagttttggtggatatgaaatttgtattggttactcatccttcttacagtggtttggggaaatttctgagaagcaaaagggaacaaagatacctaactccatgccttaaagtcagaaatcaggagaacattttacagtggtgttggtaaaagtcagatggctgagaaacaggatttgctgataagaaaattgaggcattgtatatacactattcatttggcaacctacctatgtgatggtactgtagaggtaaaggattcataaagacttgcagcctaactggcatgaattatgttttcaagttagggaatatctgagcctatttaaaatcctgtggaagggagacattgaatatctggaggcttagtgaacaggattagaacctaggaatatggatgtattggaatcagggatgtgagtgaacaaaatcgcaggaaaaaaaaggcttcctaaggtgcagaattagctccagttattatttaacagttgttctcagcattacttaaaccgctttaaaataggtaatgtctccataaagttatttctaagtaaaacaagcaacattgtgatgcttgaagttttttttaatttaaatgtatattttatggaattattctgtcacttaaatgaaactgtaaaataaatgctatgtaggtatagaactataggcaagcattatagtttgaaagaagttcttgtaagatcagggagtctcttatttatttttttctcagtttttctcttgtttatttcaatgtgttaaaatatgtccctgcttatttttacttttattagagaaaatggtgtatatgctgacctgagtccacccctttccccaagtttctttttaatgtttctattctcatctttggcagtggcttgaacctggcatctgtagcaagactcagaggaacttgggaaaagttaccaagcaaatacgagaaacatcttcaagatctacaagacatttttgatccatctagaaacatggcaaagtatagaaatattcttagtagtcaaagtatgcagcctccaattattccactcttccctgttgtcaagaaagatatgacatttctacatgaaggtatgaaaacattatttattgatgttttaccacatggtttatctaaagtctacctgaattgatttttgtgtatggtatatttcctattctattaatttggtaactatacactattttaccatttttctagtgttgaattagatgtcataccatacatatttgttaattagtttaatatttattagtacttttttctgtgtcagataatgcaaggaacttagaccacttaaattccatttgctcagctggacgcggtggctcacgcctgtaatcccagaactttggaaggcctaggcaggtggatcatgaggttgggagatcaagaccatcctggctaacatggtgaaacccatctctactaaaaataacaaaagattagccgggggtggtggcggccgcctgtagttccagctacttgggaggctgaggcaggagaatggcaggagcccgggaggcggagcttacagtgagcctagatggcgccactgcactccagcctgggcgacagagcgagactctgtctcaaaaataaaaaacaattccatttgctcatctcctgattttcatgcagttgttgctgtgcttttaacacaagatattgttgcttaataaagtcagtatttaaccttgcctgtatatttacttttgttgttgttactactattttttattcattcttgcatttcagagcttccgtattgctgggcatagtttttcggccttatagaacactgtttagtattctccttaagtgcaggtttgctggtgatgaatatctcttaatttttgtttatctgaaaatgcctttacttcattttcagaggatttttggttggcagctatcttcttcaaacactttgaaatgacattccattgttctgtgccttccactgttaatgttgagaagttagcttacagttttatttgctgttgctttaactgtaatctgcctttgtttgatactggctgttaagattttgttttttcttaatttctttctagttttgcttaatatgactaagtgtggggttttgtttttgtttcttattccgattggtgtctgtaggacaccttgaaacctatggttttgtacttttcatcagtttgggaaaattctcagtaattttatcttttattctctctccaactatgtctcatttctggtaagttcattactgatgtcctaattccagttattatttttgtttgttttacagcttcctttttctttttttagtttaatgttcttttccagagttctcattgttttttcttgtctttgaacatattcaacatcgttatttcaaagtctgcctctaataattccataatctggatcccctttgggtcttaatctgttttctcctttttactctttcatttctgtcatgttatgttttctcctgatgtgcctggttattattgaaaagtgagattacagaaataatctcgctttttgaatgatgttccatatctccagagaggattaaagtttgcttctggcaggcagttaggggtgctagaattccaaaatcactttaatccgttttgatgtaatttaacaaaagacttttatcccagtctacattcagtttatccttggtctcaggatatagctcttcagagtttcaaccaagcattggaggtttacaaggacttaagttgcttttccttttacctcaaaagacagggtgtctgtactcggtttttcagctcattatccctttctgaaatcagatacacctaggggcaagcactgggaaatgcaaaacttgcttctctgcatttttttgtacttttgtccagcttttctgatctcaccagaagtgttgttctaattatgtagtcttactgcctcttctttcattatcactcagttttcataaggaaatgttacaggcttcagatatgtttttctgacatgttccttgaaatatgtttatataacttgagagtattcgtcatgattactttgtttccagcttgtgttgagaccctgaacaattcatgtgtccaatctatacgtgctgtttaccgtatgttcctcagtcttgccttcagggccttggactttgacagacctcagggtctacctcgggggataaatggggtcatgctatgttatagacaagtgtgaaaaaacaatgctataaacaggttgccctttgtttgggatttttgttttgttttgtttttttgtggatttttttgagttgagatctcactctgttgcccaggctgaagtgtagtggcacagtcatggctcattgcagcctcaaactcctgagctcaggcaatcctcctgcctcggccttccaaagtgctgggattacaagtgggagccattgtgccccgagcccatgaaactggttttagaagccatgcacagtttatcatttgactttattcataaccatcactcctatatggaacacagttcctagtggctcattccctaagagcagggttgaaccatgtatgggtataccagttcttaaaagcaaaattggcactgtgataaagaaggtccttctttgtgcccctcaagattaccagcttgacttttgctacttttatgtagataatttaattttgaacttaaacatttattttcattctataggaaatgactccaaagtagatggtttagtaaactttgagaagttaagaatgatttccaaggaaatccgccaagttgttcgaatgacttctgctaacatggacccagctatgatgtttcgacagaggtaggacattgaaatatgtaaaagtgttagagtggtatcaagggtgatgtaataattaaaatatttatcatttattgatcatatttattctaccatgtgtgctgtacaaagtgctttatatgtgtccgtttcatgtaatcatttatcattaataaccataacaggtaggtgatattagccttcgttatacatattaagaaactgaatgaagctcagagcagtttttacataatttgcaaatatttgtatgtggatagttctgtattattgttctttaaaacatcagcaggccgggcgcagtggctcacgcctgtaatcccagcactttgggaggccgaggcaggcggatcacaaggtcaggagatcgagaccatcctagctaacaaggtgaaaccctgtctctactaaaaaaaaaaaaaaaaatcagcaaacaaatacaataaaattgctgatattcatcttgttttcatctcgtttctaagctaatttgtaaagtattagtctatgtcttttatttttactgaatatttttaatgttctgtttctgtttaattcatacttcattcctgtaaaccatttttctttttctcaaattatactgtgtttcatttgtatataagtttttattacatacaaatgaacagaatttagaaagtgcaaatttaatcatactttactaaaaatgaaaaattttattgtgttctgtattaacctgatattttaagaatgctttttaaggttcatttttaatgtaataacaaaggcttcctcagcttacataaaattgaaacaaagtatgttgttaagtattcctagtaattttttttttttttttgagacggagtctcgctctgtcgcccaggctggagtgcagaggcgcaatctcggctcactgcaagctccgcctcccgggttcacgccattctcctgcctcagcctcctgagtagctggaacaacaggcgcctgccactacgcccggctaattttttgtatttttagtagagacaaggtttcaccgtggtctcgatctcctgacctcgtgatccgcccgcctcggcctcccaaagtgctgggattataggcgtgagccaccgcgcctggcctattcctagtaatttttataattttcagggtgtaaataagacattgtggttttaatttttgatctgatttccttttgggcctatgtgtatagcttcagttcacagggacattaaaaatgaaatcatgtacaggggccgacacaatttctatggcttaaaaaaatatactgtgctaaggaaacaaaaatacttggtattaggttggtgcaaaagtatttgtgatttttgccattacttttacaccaacacaatattttaaaagccagagttggaattttcgtaacccaatagaaccagtgatacactgggtttttttttatttgttttctttaaattgttgtttagggatctttgtttttgagacagggtctctcactctggttgcccaggccgaagtgcagtggtggtgtcttggctcactgcagcctcaacctcccgggttcaggtgatcctcccacctcagcctcccaagtaactggggctacaggtgcatgccaccatgtccagctaattttttttttttttttccagtagagatagggtttcaccatgttgcccaggctggtcttgaactcctggactcaagcaattcacatgcctcagcctgccaaagtgctgggattacaggcgtgagccactgcacccggcctaggtgtctttgtttttgcaagtagttgatctgatggtttctctggtttagagatccacaaagcatggaaggaagggagagtgtgccagatctcctctttcctgcacatcccacttctgcaccttgagaatcactacatgtaatgaatgatgtcattgcttaacagtgtggaagcagaaaatagtaagaactaggtaccaaagcaaagaagggtttgtttggttttttgttgtatgtccttgtacaatgaccctaacactctctattggcttatgtggacctctatttacttacacatgttaacatcctgattcctgaagacatgatgaatttgtgaccctgccagaccagtttataatatactaagtactagccatacttcagtaatgagcaaaggagaaaaactgatgaggaaattaataaacatggctgttttcttgggaatggcctggattgaatacaataaggtattgggggaaaataaaaaacatcttttttaaagattggactgaatttttcctgaatcagttttgtcagccagtgctaaaatgtaatacctttctttaagcaaacaatgtccattttggtggtgtatgagtatctagtttggacaaagtaaccccttttaacagtaatcaatttgcagacttaaaaaatagaatctttagtcaatcaaacaggaatgtaaagatatatagtattatgaagattttaatgatatgttttttcttacattttaagttggatttgctggtcaacatttcttacaagacatcttgtcagaaatttctgcacttaaaaatgaaattttatgtttttatgtcccttgtaatttcattctgtcacttaaatgagtggcccaaaaatcttgccagcaagatgttcagaaattctattcctttaaggtcttttcccttaaaaactttgaattcaaaatttatattatagtaagtaaatgtttttccttaagcttcttatttatataagcttcctgatgaattaggtatttaaaatataattggtctaaagcatatttttataaagtattttggagcttttttgaccttcagtatatactcatcttaccctcctgccttccatttaaagtcattttactgttaagctgtaattttttcctgataaaatgtttctgttcttttctgtctgcatagtttctctgactctcaactgttgtcttttttctgtgctttcctattcaaacacatgcttcaatgtttgtggctcttgcttacaggaagaagaggtggcggagtctggggtaagtgtagagatgaacgcaactggaatgaaggttgtgcgactcttaacatatattgcatccttttcattaatgcacgcacataaaatagcatgaattctattaaccctgtcagcctacattcctgacaaatgccttctgctaacaaggtgaaagtagtgatagaactagctatttttcctttatttttccactattgatgccctataagtcctttttagattttgatttagctaggtcagttagatgatgataatgatagtgaatatttgttgtgtgcttgctatgtgccatacattgttctaagcactctaaacgaattatcttacttaattctactactaccctataaaggagatacttttctttccatagtatggatgggaaaggttgagttgcctaaagttttagttcattaatggtggatccaaaactaggtagtctagttctagagttcacaccactttcttttattcaaatgccacattttataaaagtaaatatatcatataaatatataaaaatgaatgaaagatgtttgtgaaggttgcattttccatcagttttctaaaaagaggcagcccttatccaagctgtactataaaattgaactagaagatgattttatttcctcagacccactaatgccacttacttgtagcattgactgaattttatttgaaatttttaccagctttaattgaagattcccttatctttaaagttgtgatagaatcagcaactgacactatttgttatagagttaggtctctacttctacatagctaagtgtctatttagaatcatagaatgttaaagatcttatatatcatctatctagtcctttcatttttagatgaagaaagagatgacttttgtggatgaagggattgcataagaagaattttgttattttaagacttgtagtgaaccatgaagttagaagcttttattacatgtaagaagaattttttgtgagccaccttctttattcgagtcttgcctcatttgtggtcttattttctgttaatgcttggtgaacttgactttccttctattttctttctcccttctctgtgtgtttcccatgtgttttcttctggatcgcaaatttatgtcttggtctcttttggctcttctcactgaaaatagaaattgatacctggcattactattataaagaagaatacttggacaatatcttttagtgggcattgggtgtgtttgaatgacttatgttaacatgtttcacgttcattcagctttagggttacactgtatgatgcttacaaacattaggtatatttattttatatcagcaattttctgttttcaaagtagtttagaaaacattttatcgacgtttatcacagtgtttttatttgttagaattttgtgtctcctagatttgtcaacacctacttttttatattaactaagataaaaatcattaaatatttgtgttaaaatttgctcctaaatagctgcaacttgattttactgcatttctttgaattcaagacaacgtcaattgttggacatattgttattttatctactactaaggaaaatcactgcagtatcctgttaccactgagaatttctactttatgcttattgaaggagctcttatggacttggctatggatttttatcacagtgtgaaaactgaatttttaaaaatcaatatttttattcacataaaaaggaaaatataagcaaagtaaattggtttaggttttcctaaaatttctttatattcaaaatatgaatcttctgaaacgttttcttttagagtcattagcttctggattttgttttccagaaccctccttccccatacagtattgccctctgtgccatccagtgtgttggtaatgcaccatttctttgaaaaaccacaaaagaaccaaaagctgctggtgctgggctctcaggctagctttggaaataattagaattagttttctcttgtcacttgctttgggaatgttcttgaacttgtcagatttactacttccttataatcatttggtccctggaggttaaaagactaattcactaatggctttggattttctttcaagccattctgcaagttttgaggtctctgcagatgtaaataatgtcttgtcatagtttctgcctggccaatagcaattgaaagttgccattcagtgtaagatatacccctattggaaagatcttaaaatgtgaaagaaaaaaatgccataacactttttcaactatatttcacttaatttacaatgaaagcattaggattttagtgtctattttaaagtagatatatgagcactgtggtctttgtatttagaatacttttatataaaaatggagcttaatttagaaaatccatagataaccttattattttggaatggcaaaataaaataccatctaaataaaaattatataagaattttgtatttgttagccttgttagaaaggacaaacatcattgcagttgctgttttccattggttctagatgtgcagtcgttgtaggatgtttgccaaaaagagtagagtcgggtgaagctgtagtttgtttgaattgtggttatttccacccagcttgcaattctgtcacattcacaggcattacaaaagtgatgtcccagatcctcagttctagaacccaaatattgcctaaccattccatatttgagggaagcattgagtttttactgcattctgatgtccgactgtattgaattgcatataaatgctgtaaattttcagctaacgtgttattggtagttctgtttgagttttggccaaaataatggttactagtaaaattggttaacatgctcacagtgggcctgctataatggtagtggcaatagcatgtccaaagcagaacaacaagcaaaactactttagaaccctcattgctaaagaaccctggttcagagattcggctgaggatggacttgtcgtggtccagactcttgccatatcttcaaagcgtgggtggcctccaggaccagaggaatgctttttcttgttactgttgtgccataggttgcataggcacaaacacaggcctgatggaatatgccactcagggggccattgttatcctattcttttgaattctgtactttgccaaatcctgttcttaattcagaacgtcaccatatgtgccaaattactttgcattaatgctcttcatcttttaactcatttacatcagcatgcaatagcattaacagaacaaaatcttttaatcttcaatctgctatgcttagttctcatctctatagccccttattgtgattttcatcttcttataggtcactgagtcaaggaagcacaaattcaaacatgctggatgttcagggaggtgctcacaaaaaaagggcacgccgcagctctctgcttaatgccaagaagctatatgaggatgcccaaatggcaaggaaggtgaagcagtatctttccagtctcgatgtagagacagatgaggagaagttccagatgatgtcattacagtgggagcctgcatatggtacctgtgagtacaagttttcatttatgtgacgctaaagagcacaacaaaataaaaacttatttctctagaattatacctaagtcccaagaaaattaactttcactcacaaaagattgctggcataccttaagcatcatgtgatccaattaatcacagactgaatcccatccattcctgatggctacactatccaaaaaatagagggataagtagatctttaaaaagctttttaattcttttaaaaactggatcattatagaggaggctttctgtttgagaacatttttatattcatccctaaagagtaaacataagtggaatttttacctctttttatttcatggataatatttaccaactagaaaatataagaaatttgattaaaacaccagtgataataggtagcttacaggtgccagtagtaaggtaaaacaaaaaaaaatcagacacattccaatattagtaatctctagaaaatgtgatggaaaagatcgtgttctcaatatggattttttttaattaaatacaagcaagagaatgcatatatatttggatcaaggaaattatgaattctaagagcagaaatcaaagataatgaaatatatactgttataacaaaataattgtacatcttaaattgtaggttaaggccaggcgtggtgggtcacacctagaaacctaggcaggaggatcacttgaggccagccttggcaactcaaagagaccccatctctacaaaaaaaaattaaaattatccaagtggtagtgctagcaacttgggaggctgaggcaggcaggtcacttgagcccaagagtttgaagctgcagtgagctaggaccatgccagtgctctccaccctgggcaacaaagtgagactcagtctctcaaaaataaatacgcgcgcacacacagacacacgcagtgggttaaatttacaaagtgagactcagtctctaaaaaataaatacacacacacacacacacacacacagagagtgagttaaatttgcccataaaaattgaaatagaattttatttcaaagttcctagttgacaaggggtagtagtcatcatggattgaccctaagattgataaatgatatggtatttgcatagtaattttttaaagtatgtcaaaagaaagaatagaaaacaggaagtggaaatagaaccaaatactgatttttaaaaattcagttttgacaatttttaaataagggtaaggagccttttaataagtgctataatcaaaacaatatcttgaatgcttctgcatataagaaaagatttggagtatgatggaaagaatacctacgaaaggatagaggcagaatttgagtttcatttattacatttgagtaaggttttcttcatctttagtccctgttttctcaaatgtaaaacttgggcaagggttgggagtacattttatttctgtgattctttgtacgtcgaagttattaaatttggaaaaagacatttttaaaagctaacagttattgagagctttctacattctggctgccacatgttaaatggtacatgttaaaggtaaaagctgaaagagtatatagaacctttaacatttattcatgctttaaagttcaaagccatgtacatatttattaaagctttctggccctgctttgagtcatcatcaaagttattttttcccaggtaatttgatgtagacttaatcatcttatggttatgaaacacagtttatatacaccctcatggcttcctcttcttacacccaccccagacttgtgtctgtcttttctcatagcactaaatgatgtcccatgctacatatttaataaaatgagaaaatctttaggcctttctttcttaaactggatttgaacatttagttaaatgcatgttcctttaatttggtttgagcatctttataatgcataattgatttttaaatgtttaaatagtcactatccgaagcccaaacaatagttgatttctgagcattatagaatttgattcttcccaattaattagaatatatgtggtttttgtcattcatctgtaaacttatttttgaagtagtctcaggtttttttctttgtactgtagcaattattaaaataagatgtcattgattagcatttaccaatcaatgagagaaggatgaaagtatttcatggctctaaccaaagatgataacctcttggattcaattagttggtgagccattgcaattttctcttggggtccctgtatttgaactttctaagacattctctgattcttatcaccccaaatattgtctagtctgtcttaataaaagcataatagctattatagctgtgttgagacagtttagacatctatttttgcttttatcttgatgtttaaaacaaatacttcatgaagtactgaggctgcacctgcattgaaaccaccctggataacctaaggattaaaagtactccctgatggaagaatgtcttccccttggactatagtattggttttatatgaaggaggcagcttttataagtaagggttctcagttttttattctcacattcatattcagaaaacctatggatttataaaagcactgtctctggttttcttgtgttacagctgttgagataatttcacttatttattcaacaaatacccattaagcatctgttttcagtcagttactggcacataaggatgtaataacgaacaaaatgcatagtccttactctcaagtaggttaaagcctaatgaaaggaacagagaagataaagcctaatgagagtataggactggtgagaggaaaggtaagcaagtcaagtcaagggagcaggctgatgctaaatcatgcagggtcatataggccttgttttaaggatttgggtcttcattctaaaagcaggggcaagttaaggtttgtgcagaaggagaagggaaatgatatgatcaaatactcattttggcagagtcactcttctattctatgaagaatgccttgaaggcatgctagaattgatacagtgagaaaagtatttcagtagtaaaggtgagagaatgttaacttgaccctcagcagagtgatgatggagctaattaacatggattcaagaattatttagggctggatgaggtagctcacacctgtaatcacaccactttgggtagctggggcatgtggatcacctgaggtcaagagttcgagaccagcctgggcaacgtggtgaaactccatctctactaaaaatacaaaaataggccaggcgcagtggctcacgcctgtaatcccagcactttgggaggctgaggtgggtggatcacctgaggtcgggagttcgagaccagactgaccaacatggagaaacccctgtctactaaaaatacagaattagctgggtatggtggtgcatgcctgtaatcccagctactcgggaggctgaggcaggagaatcacttgaacacttgaacctgggagccaagattgcaccattgcactccagcctgggcaacaaaagcaaagctctgtcttaaaaaaaacaaaaaaaaaagccaggttttgtggcaggtgcctgtaatcccagctactcaggaggctgagagagtagactccattgaacctgggaggtggaggttgcagtaagccaagattgcaccattgcacttcagcccgggcgacagagcgaaacttcatctcaaaaaataaaaaataaaaagatttatttaggagataaaattaacaacttattctacaatagttttagagataacattttttatctgactcaccaaacaatagagataacatcttatagtacttaactgaaattcctgctaagaaaaattaatctattttatcttttgtgctaaaaatagatggttttaaagtaaccatttattattgccagtggtgataaccttgcctaaaaacgtgcagttacttatttcttactctctcctgttagtgaccaagaatttaagtgagaaaagatcagccaaatcatctgaaatgtctccagtgcctatgaggtcagctggccaaacaactaaagcccacttgcatcaaccccacagagtaagccaggtgcttcaggtgccagctgttaatttgcaccccatcaggaagaagggacaaacaaaagaccctgcactgagtgagtattcaccattaatattacatccgtttacctgaaatttccaggggagttagagtgaaaaataattacagatgttcaggagataagctgttgtaggttgtgtaatataatcgtcactttatgaatcaaaaatgttgatttcattttgcctatagatgtttgctgacagcatacgtgttttaaatgccaacattgaatttcctataatactgaaatctgtcgatcaatagaaaatttacagcaatacattttgggtaccaagggcttactgcattcagaggtgtatttaatgaaatatccaatacagatgcaacctacaaaaactgtggaaatgaagttgcttattccaaaaatgactatacgttgttttttgtctttaaagaccccttctgaaaacgtggttgggaaacaagagaatataacttttataaaatatagaccacactttttttttctgttaggccatatagtcattattcatattacttttatttgttgttttgacagtatcactattttagccttttagatgagaacctagattagatttggttcctagcatgattacttaggctgtacattatatgtagtatatgtttagtagaactttgttcatttaatttgttattgtttgagatacaaagttgaataagaaattccccctccttgaccagattttcagtctggtgatgtagacactcacacaggtaacttcaatataatgtgtcttcttcttatgccaggggtatatgcagaacatataaaagaacaaaacaagagcttttaacttagacagaggtaagatagggcttcagaagaaggctttttggaaataacatctaagcagcctaaaagattggtgacgaagaagataattaggcaaaagttccagagaagttgcttcaggctgaggaaacagcttggtatgtgcaagaaactacaagcactttgctgacgctgagtggaaattgcatgcagtgttgacagacaataataattaaagctgacacttggagagcacttactggtgccaggcatggttcaaattgtgctttactaattttatatatcagtcttcatagtaatgccacaagataagtggtattttaccctcattctacaaaggaagcatagaggctaaaggaaggctgactggctttaaatctttgcctttaaccactgtactaaacagcttccaagatgcagagaatgaagacaggtatgctgaaattacaatgtgccatgccaaaggaaaaagttaacattgagaagccattgaagagatttgaacaagagaaggttacggttcaaattatgtttgagaaggactgtagtgaggatcacagcaggactggagatagagagctcagatggaaagctggtctaacagttaactggaagttgcccagggcctggactagtttggtggctatggaaatgaagagagaattgggtgcagaattggtgaagttgataaatttgttggtaggagtgagagagggacaaagttagctctggtttttttacttgaatatcaccacttgagaggaagcattacttatactatgtagcttcctttctttcttttttttttttttttttttttttgagacagagtctccctctgtcgcccaggctggagtgcagtggtgcgatcttggctcactgaaacctccgtttcccaggttcaagcaattcttatgcctcagcctcctgagtagctgggattacaggtgcatgccaccacacctggctagtttttgtatttttagtagagatggggtttcaccatggtggccaggctggtctcgaactcctgacttcaggtgatccacccacctcagcctcccaaagtgctgggattacaggcgtgagccaccatacctggccacttactttatgttttaagaacagtgtctatagctctctgacatttcttagagaagatgaatgtaaaaacgtcaatatattgaaagcattgctaagtttgaggtacactaaacagaccagacattggacaagggtaatgataggactgtaaggaatcgttccactgtgctgcatactatttttctatacattcatgattttttctgttgtttacttctctcctgtagtgtgaatttagtgctcttgaaaagggctggactggcagccctgcagcctcttcccgtatacccacagcacagatgcaccacaggtagtgacagtgccaacatccccacactgcccctgccacatgcgtcgccccgacttggagaggccacctctagaggggagggaagagtttgaatccatgccttctttttgaagatttcaaatcactgtgtcaattgtgggaggtggggcatagcactcagactgttaaattgatttcccttataccacaaagtgcagacaaactaatataatctggtccatgctgaccagctgaatttgaatgaataacctagaggtgagaatctctgtatgccattacccagtcatttagtccctgtttgtcatttacacatttcagttgactacactagccattgtgcatcatagtgttagttatgtagtgatttaggcaactatagacattttaattgtgaaacgatgcttatttgcatctttggttttatttttagatacaagtttacctcagaaagttttaggaacaactgaagaaataagtggtaagaagcatacagaagacactatttctgtggcgtcatctttacattctagtcctcctgcatctcctcaaggctcccctcacaaaggtaagacaaaacatttcaaactagttcttgttaaactaaacaatactttatagcacatattttgcttttcaatctatagcaataattataaatcattaagaaaagcataactcctaatgctttttgaactttgatgttttgtattgcattattcagatgctttttagatattatgtgtcatgtaactaggactccagtattcaaagtgtggtcctaaacttcaacagacagcaagcatggataagaataaaggcagaagccatagttttggtgcaaattcttggtgttatcattccagtttcctatatttggacatttctatgaagtgtttacaagtaaaagtttctgtaagagattctttttaggccaggcacagtggctcatgcttataataccagcattttgggaagctgaggcgggtggatcacttgagcccaggagttggagaccagccagggcaacatgatgagaccccaactctacaaacaatttaaaacttaggcatggtggtgtgcctgtagtcccagctacccgggagactgaggtgagaggatcgcttgagcctgggaggcagaggttgcagtgagctgtgatcatgccactgtacttcaacctgggcaacacagcaagaccctgtctcaaaaaaaagaaagaaactgtttttaaccaactataagatttaggaaaacaaaaattaggaaaacaaatatgcttttccttttttagtaacagagtattaccttttttaaaattaggatttaaaataacctgtactcttgtggattttttacttatacagaatctcatgaggtaaaaaactgaaattcttgttcatttacgtgttttcataattcagactggagcatttcttttcttggctagcctgggcagtgtgcagcagatgccatttcatgttagctgcacatgtagcattctaaatatggtgtgtatttcttatattgacccttcacactctgtgtgtaccctggaaagaaaggggatttagtcctggcatcttcttcacagatgtaaaagaattacatatttaaataatcacaccagaggatggtacatggtcagagggaagacaagcttattataataattctaacaggagagagaagcttccagagcttgcttcagcttccaggctctaagtttcatctcactctgcagagctctttcttatttttgccacctatgtggcaattatgtacagtgatgtcagacctgagtttgaaccgtgattctgtcctccactgtagctgtgttactacaagtaatttatttatacggtcaggtttcctctctgtaagatgggaaaaagaccatctaggccaaagcaggcggatcgcctgaggtcaggagttcaacactagcctggccaagatggtgaaacccatctctattaaaaatacaaaaaaattagccaggggtagtggcacatgcctgtagtcccagctactcaggaggccgaggcaggagaatcacttgaaccaaggaggcggaggttgcagtgagccaagatcatgctattgcaccccaactagtttggtggctatggaaacgaagaaagaattggatgcagaattgttgcctaacctgggtgacaagagcaaaactccatctcaaaaaaaaaagaggaaaagaaaaagaccatctattttaacagcctcttatgtggtttaaatgaaataatatttataaagcctcatgtgtggtaagtgtttagtgaattggaatgtctcttttctttctctgcggccacctcaggacaccatagctccattactcacttgcttttttcatcctcacatagctgagactggttagatttttttcattcagattttactaaagaaagcttaataaaaatgaaacaggagataaaaacagtttgtatagtaggtgtatttataaaacacagattttgatcctgttgtagctcatatgtaattttgtgtggcacacagacctatgtcatcactttccttgtctgtatggtcctatccaatgcgccccttaccagatcttgcgatgtaggataagccgcagtgcctccagtcagacagatggtccaaatgaacagtatccatatgctcctaatgctcgttcaggaacacctttacactccttacccctgttagaggctgctcagtggtccatcccattatagctgatttggtattttatgcctgaatgtgacttctggaaagtggtattagaaacaggaattcctccattgctcttattcccaacaaaatctacactcaacactcgaatagagaagtattttctccctttgtgagaaaattgtagccaacaattgaacaccatgtttataggtttgtgagcttctcgtagtaatgtttagaattcttagaagcctgaagaaattcttctcttcaaaactgtttcagcttgttcttgcatgtgtactatcaaaaccccaaccaagtatgatccttctatttttgtagacaggtttttgccagtaacctatgattgaacaaaactgtcattatgctcagagtaaattattaggatctgttcctggttcttattaaacttggagatctgttctttgttttcttatgattaagaaaataaacctgtcttcatgttttgcatgaggatagtttaaacaagaactttaaaaaagaagtcaaaagaccttaaacattatctaccctagtgtttaagaaaagcactctccaccttggatctacaacaggatcagaaaatgaacgttataaatatacctattgtatgtactatttatatgtcttatttggtttttactaagcttcttcatagtaaaatctaccttacaattctagacctacatagttactttacagaaataattctagttacctgatatttttgtcatatttttccttatgattttaccagcttggcttcctttcaacagtttttttgtttttgtttttgtttttatttttatcaccagcttgtgctgataaaggtaatctttctcctgcattctgtcttgcaataactgatgtgtatatgttttatatataagtagatttttttccatgcattaaaaaatatgttgctagatttcaatttttcagatattatcaagatgttagaatttttaaatagtgaaatattatgtaaacaaggctaattgtgattgaccatgtcagggtttttgcatctctccctccagttggcagtatcatatctgatcacagcagcaagatcagtggccagagctgccccggaataggtggggcttacttgcaaaagaaaatccttcagattaccaggagcacagccaaaagaacagacagtactgagaaggccactgaggagaatagagacaggacaagttgtgagaacacaaccagaaaaagaatgacatccccgtttagaagacttagggaaagaatgctttcaagggagagactagtcaacagccaaaaagaggacacagatcacaatcaagctacagaaagctgtgagaaagtgaaggatgttggaagcaacatcaaagatgagaaagggagtgccatcttcaattcaaatagccaaggcaacagtaacactttaaactgcttctatacgcgattcaagtctaaaaggaggaagacactctgatgaagttccttatttaattttagtgttaagtttgttttcagttattaatgtatacatggcttaaattaaaccatttgtcaaagcttaggcagacaacttagtaaaatactatttataaacacttgaaaatgcctcatttgtacataagttattttactgatgtattgagttagtaaattttatactcttgttttctgtagttgactttatttcctactgttagctggatctgtgagtgaaatatgtagaggaggcttttttatcttctactttttacgtatctttgattgggggagaagggactagtctaacatagcaatatcagaatcatctgggaaacttgttaaaaaatgcaattactgtgtcccaccccagacttcataaacttgaattgccagaaatgggatctggaatgtttattttaattggcttgccaggtggttcttagtattattatatttgagaaatactgatcaaatagacataagaatgaaattattttttaaacaatgaagcaagattattgtgtagagcaatgactttttcttttcaagaagaaggtttttatttatttttaatttacttattacatccactttcttggtcctcttaaaaattgactaatcagctcatggacattgacaaatagcagtgatcccaagttcagagatgtatgatagacgtcagaagactggcttgtcttggcttaccctgttcctgtccacgtaggccaaatataaatcacacattttctaggcctttttctctttgaaatagttaacgaaacgacttaataagattactgtgcaacaaattattccttaaatgacttgagttatatgtgaataactccaagatccataaacagagaaagacttggaactaaggatgttgtcatcctctttctgcatgaagatgaggccctgagaattccagtaacatacccaaagcctgtaattcttcctaatgacatttctaggtattggtccaaaggtcacatatctactaaaccctactttcctctgtgagcaagaagatattttttacttctttgagacccgtcccttgttgggattactagggcattttctttttcttttatttctaaacaaaaatttggtttcttccagttatcaaaatagattattatgtacattagccattctgttgcagatttgtttttgggtccttcacctcagtgcgtccctagaatacagaagaacatctctctagttgtctgctgtgcagtaagtcacagaacaacatagaacatgtagatgctgtttttttctataacacattattaaacatgtatccactcagctgtttaatattctgcaaggttggtgaagaaaaaggaaactaagtatgacactaagtttaaacctaaaacaatttaaaaaactgaaacaggctgggcatggtggctcatacctgtaatcccagcaatttggtaggctgaggcgggaggatcgcttgaggccaggagttgaagaccagcctcggcaacataatgagacctcatttctgcaaaaagtttaaaaataactgggtgtggtggtgcagaccgtagtcccagctacttggggctgaggcaagaggaccacttgagcccaggagttcgaagctgcagtgagctatgatcgtgccattgcactatagcctggcaacagagcaggaccctgtgtctaaaaaataaaaataatctaaaacagtgactctcaactcaagacaagacttcttaggtgggatatgcagaatatatggggtaagtatatatagtttgataaagcaaaaatgtagttctttcccttgagtcctggactcccacccctacccttacttcaagatggtatttgggattcagatcaggtcaagaaatattcatattaatcaaaggaaggagcgttgggttaaaaagaagttgagaaaccctaaagacatgtacttattaatatttgtaatcttcttattttattaaatgattatagctgtgggagagcctgagaaagatatacctttaaactagttttctgagtaacactggactttgactgtctttttcttgaatgtgtagttgtattggtgtggtgtggatagtaggcaaatggttatgtaggggaatgtgtggagaaaattggcaccattatatctacatagatggaaactaaaattgcttctactttgtcttctgttatttttgtggggtttttttttttcatcctttcccctactacccccaccatatgttccctttttttgtagtttgatcagtgctcttttcttgttcaggttacacacttattccatcagctaaatctgacaacttgtctgactccagccatagtgagatttcttcacggtccagcatcgtgagcaattgttctgttgactccatgtctgcagctctacaggatgaacggtgttcctctcaggccctggcagtccctgaatccactggggcattggaaaagacagagcacgcttcagggataggagatcatagtcaacatggccctgggtaagcatcattgtctgtgttcataacacaaaacccaagccaagtggccactgcaaggagtgctccccaccttgaccttggacctcccatggggtaattgcagagttatccataaaagaatatgtgggccaagcacatattctctattctgaatatgtaaataagcactatgttgaaagatgtatgggtgttcatttttaaagtgttactaaattcaagtaactttttatcattatgtatctttccagtcagaactcaaagtgcatctgctacttatataggggagataatttttgaaattctggctataggttaatcaaaaaggttgtgttttggaaagtgcctcgagtgctgtgcacattgtagacaggttgggagagtaggactagcccttgatctctgtcctctgaaagtgtaatttggggagtaagaataatcacctagcaaaggttaattaaaaaaaaaaatcaactctaaatttctatttagaatcaagcaacgtggaaatctttgagaaagtttattctaactgataaatattgtgaaatctggtctactttaatatgaaaaatttaagataaattattaccacatttataaagatttctaaactaggatctctacaccagaggtcagcaaatgttttctataaaagttacatagtaaacattttagacttcacaggccataaggcctctgtcacaactactctgctattacaccagaatagccatagacaacacataaacaaatggcatgactgtgtcccagtaaaacttttttttttttttaaggcggagtctcgctctgtgagacagagtgtcactcttgttgcccaggctggagtgcactggcgcgatctcggctcactgcaagctccgcctcctgggttcacgctgttctcctgcctcagcctcccgagtagctgggactacaggcgcccaccaccacgcccggctaattttttgtatttttagtagagacagggtttcaccatgttagccaggatggtctcgatctcctgacctcgtgatccgcccgcctcggcctcccaaagtgctgggattacaggcgtgagccaccacgcccagccaaaactttatttacaaaaacgagcaaagagaccaccagatttggccctgggctgtagtttgctaccccctgcactatactgtaaatgaggggtttacaaacttttttttgtgaagggctgggtagtaaatattttcacctctgcaatctacatatagtctctgtcacaaattcttctggtttggttttgttttcttttcttttttaaccttttaaaaggttaaaaaacagaactattctttgctccagaccatacaaaaataggctgttggctaaatttggcccatgagctttagtttggggacccctgctataaattattcatttcatgggtaattggggaagttgctgtttacttggcactgtactgggctaacctcagaggtacgttgaaaaataaaacatgattcttcaagttgggaactcttaattctgtatgcatggacgcagtagtctaatattgtgatgaccaaaaatgaatatgtatacttaaccttattcatttcaactctcatctttacattttcatttaaaatcagttcaagaaaaatacttgccaggcatacctctggtccatcccagctgctggggaggctgaggcgggaggatcacttgagcccaggagttaaaagctgcagtgcatcatgatcgtgcctgtaaataaccactgcactctggtctgggcaacagagtgacaccctgtctcgaaaaaaaaaaaaatatctaacattttaaaatttaaaaagaaaaattctaaggaaattttgctaagcattagagtttctttactgtgtcttctgagtgttaactaaatacttacaaggaatatagtgatgaatgatgataatattgttttcctcacgatgttatttggcatgaacacttgtggtacgtgctctgtagtttctcacaggcaataataacttgaaacagagagaagatagtttttctggcaagccttctaattgtacgttatctccaattttaggtggacactcttgaagccatctctaatcaagtgtttagctgtctcatcgtctgtgagcaatgaagagatttctcaagagcatatcattatagaagcagctgacagtggtcgtggaagttggacttcgtgttcaagcagctcccatgacaacttccaaagccttccaaacccaaaaagctgggattttttgaactcttacagacatacccatttggatgaccccattgctgaagttgaacccactgactctgagccctattcctgttctaaaagctgctctagaacttgtgggcagtgtaaaggaagcctagagagaaagagttggacctcctccagttctctgtctgacacgtatgaaccaaactatgggacagttaaacggagagtattggagagcaccccagctgagtcatctgaaggcttggaccccaaggatgccactgacccagtttataaaactgtcacttcaagtacagaaaagggcttgattggtaagttgtgtttttgttgtctgtggcatttagagattaagtagtcaaaaaatggcattgggatatcttggccctggattttatcgtcgcaaaaattcattctctaacaacctttctttccttcacaaacaaacaagttatttcccaaaaattcatggtttctcaaagactttggagcagctattcaaccccattaaaatgaaaagtctgatgtgaaggtatttaattagagggacaagtttgtttgtcttttgtttttaagttctttttggttttattgaggaatatcatcgcattagtgtgcaatagtagtaaagggattattctctttatcacctcataaattgtttggaccacaattggtatgcatacgtggtagaaacattgaatctgctattgattttaggtcgtaacagtgagagaaaatgcaatcaggaagtccagaacatttttcagtatactctcttggtgtacatcatgagtgtgccaactcctgtttgtgaattccattccaagctttcttagtaaacttttttttttagtatttggccatcaaatactttttaaaaatttctttcctaaactatataaatacgtggatataaaactgcttttctacttatatggaatgactctactttgaattaatatcataatcaactgttaaatttatgcaacagtcatggtgtcgcatttaactactaaaaatgtgaaggtgaaatgtgctgattttatagttacttgtcaaattgcattataggttgggtttttagctcattcatttttttccaacttttttttttttttttgagatggactcttgctgtattgcccaggctggagtgcagtggcatgacctcggctcactgcaaccttcgcctgccaggttcaagcaattctcctctctcagcctcccaagtagctgggattacaggtgcctgccaccatgcccagctaatttttttatttttagtagagatggggcttcatgttggccaggctggtctcaaacttctcacctcaggtgatccacccacttcggcctccaaagtgctgggattacaggcgtgaaccaccgcacctggccagaagtaaagttcttgaaggaattagttcctccgtaccagcaaagttaaagtttatatgctaggactgagaactaatctgcccaggagtgccagaaaacattggttcatgtctcagagagaaggtgaaacagcccttaaacagatggcccaaatgtcatttctatgtaaagtctcccagtttacagagaatcggtgtgtagggtgaacttttaaatgtttctgatatctttagggctggtgtgacttcaggagttgtcatgtacttctgtgatatgggggctgaattgcagaaggaagcttgtcatcagtgtcatctccttcaactctctcgttctatttaatgtttacaggacttaatatagttgtttatgtattttaaaaagaggtttgtttattaaacttttaaaaaatgtttttgatctgccatcattcaagtttattcattttgtctatttttaagttgtattttgtcattgtaataagtttgtggggtggtttctttttttttccatttctttttcattaacattttcattgcttatttttcatgccagtgtactgtgtcacctcacccaagaaggacgataggtatagggagccacctcccactcctccaggatatttggggatttctttagcggacctaaaggaaggaccccacacacacctaaaacctccagattatagtgtggcagtgcagaggtcaaagatgatgcataacagcctctctagactgccaccagcttctctcagtagcaacctcgtggcctgtgttccatcgaagattgtaactcagcctcagaggcataatttgcagccattccatcctaaactaggagatgtgactgatgcagatagcgaagcagatggtatgttgacaagctctcttaaaggctcttaaatgaattgctgaacacattaaatggtctttactttggtattttatggtaattagtaattgtttctttaaatgccttgaatctctgttaaaaagtaagaagttcctgccggcagggtgcagtggctcacacctgtaatcccagcactttgggaggctgaggcgggcgaatcacctgaggtcgggagttcctgaccagcctgtccaacatggagaaaccccgtctctactaaaaaaatacaaaatcagccaggcattatggcgcatgcctgtaatcccagctactcgggaggctgaggcaggagaattgcttgaacctgggaggcagagattgcagtgagccaagatcgcaccattgcactccagcctggacaacaagaacaaaactctgtctccaaaaaaaaaaaaaaagttcctaaatatagtatgggggagtgttttggttttgttttatttttcaagatagggtctaactctgttgcccaagcttagagtgcagtggcacaataatgactcactacagcctcagactcctgggctcaagcagtcctcccaactcagcctcccaagtagctgggactacaggtgcacaccagcatgcctggctcattgttaaatttttcctttgtagagacagggtctcactatattgaccaggctggttttgaactcctggcctgaagcagtcctcccaccccagcctccgaaagtgttgggattataggtgtgagccaccacacccagccaatggtgtgggttgtttgtttgttgagacaaggtcttgctgtgtcactcaggctggagtgcagtggcatgatcgtggctcactgcagcctcaacttcctggtctcaggtaattctccctcctcagcctcccaagtaggtgggactacaggcacacaccaccacacccagctaattttttgtatttgagacagcattttaccatgttgcccaggctggtcttgaactcctggactcaagcaatctgccagcctcagtctcccacaaagttggggttatgggtgtgagccactgtaccccgcactgatggtgtattttttaaatgaaatgggcaagctgcctatttctgtgtgcctagtaccctgtggctcaaatggaatattcttatctttgatgaaacagtggctcaatctaatgggatacttttaacattaatggaattgtattttaccttaatgcatggaaacttgaaactgtgtttcaaatgccaaattatctgaaatgattctattgatatagttccttttattagcaaaagtcttgactgactttgtacctgtgccaatagtttgagaaatgattgttttattgaaaataaatgaaaatttatgcttttaaacaagagtaataaaatgattaaaaaccatgaaattccagtttattgtcaaccttcaatgtgatcagaaatcataggtattattataataaaatctgggcctcgatgcaatgtttgagaggatttctttgttgacattgattttctaaatagataactagattattaggatctcattaatatgctgatctgccagttaattatatattttttattttcagaaaatgaacaagtttcagcagtctagcctttggatgacctatttgaaaaccactgaaagtcgtggaggaatgggcaagaaccacctcatgattctgcaggccattgctaacgaacagctcattgctacaaccagtccagaggttttattccctctactccgagcaatgaaatagacctgagttatgcttcctttcatttaatttctgcagataaatagtttcctgagcaatggatgctatgcctggataccagtctccactttgcacgccggaactgccttgggaccacagttacagaaaaaatgtaaactcagagtgatccttgtgtatattgctatagatttttctttaacaagctattttaaagataatggcattattatttccaagccatagcttgggctgaaggacaaattgaaattgtctgccaataccaaggatattcttgtatatttgaaaaataacttattatttgaattgttgtggttttgtttgtatttgagagctcttgttagctgatattcatgtttgaggtcataaaattgtctctggtctgaccaaacagaagtcatctttacagaggtgatatgcttgatctacacagagatgtgacttgatctgtagcaccaatgcaatgtaggtctcagtttgagagaaataggaagccctttgcagttgaggtgttaggaacctgctggtcatggtgtggaaggccaaatgaagctgccacagggtttcttgtcagtcctttgggaaatgggagggagtagtttggggaggagggtgggaaccctaatttccacagaatgaaattttgatgttaaatgacatgtatacaaattcttccttaagtgaaagttatgctgcatcgaattgtaactgaaagtatagatccaacaaatagagactgggttctagagagttctggtctatagaaacccaaaactaaaatctctcataactcaagtatggaatactttttttaaagaaattcttatcatgggtgttgtaataatgaagacgaatttgactttatgcagtgttctgcagcatgcctcccccacatctcatagcaccaggttgtgtctgacctgacataccctgcagctctcagctggctgcagtaacattttgtgggagaaagaggagctggagttacagaaatgattgtctcttggttctcagtttttagcccttgagaggacatacttttccagcctcatgggtatggcactcttaattaaaatttcagtgactgtttactggatgaggcagatttttcacatttttgcaaattaaatatattttatatatattaagtttaattttttcagtttttttaatgtaaaagcaagtgaaattttaataaacttctgtaattaccaaaaaaaaaaaaaaaaaaaaagccaaagccattaacgtgcactacccagatcaacttggagccaaaaggggtttacttctgaatggctgtccgtatgtgtccacataggatttagttggtttgtggcctcctttatagaaatgtgttgtctttccctagctgtctctgctgtctgtcttcctgcatatcccccttcattttaaaatcatgaatcagttgtaagtggtaaatggtagtagttcatctttcccatcaacatgattgtctctttattttaggaataatagcatttcaaaaattcctgtggtaaagaaacattaatctgaaacttaagccttagaaattaatcgcaggtatgatagaatgaggcttggtggttccatagctttcttggtcctttgaaatgggaaataacctgaaccaaaaatcctagtttgaaagttacacttcagtgatttggcctataaacagtggtcctatgattatacattttttccttcactgatttgcataattttgttttcatggccacagcaaaacaatgtgaaatatatttttgctatacccactttttttatcaaattcagatgtctactctcaccattttatattcatttccccagaaaaatgtgctgttttcataatgtctttatttagcaggtctttcaaaccaaatggaagccttacctgtctttgtccttaatagtgtaaatatcttgcacagagtgttgaggcctatggttttggacttgcaccttacagctgcctttgttttatctatctagctttaactgtgagtgttcagatcagctgatcacattgatcaggagccaaagccaaatgctttgtagtttgttatgtatgtatcccttaaaaaatcatgaggttttgatttttatattttaactaagggtacattcctgccttctcttagtttgtcatatgactagaacaagagaagtcttaagctgcatttactccaattccagatctccatttgtttttgttttataaatttataatcttaatgaagagactagtgccctctcttcctgccacaactctcaatctgccaagactgttgaagcagttaacgctcagtgcaaacttttgccaaatagtaagtttcaacaaaatatctttatagtgaaagattttgagaattagtaaatccagtacatgattccataaaagcttattaaagttaataattctaatttactccaaatgattactttcaatatgatctttggggagaaaaagcctttagtgaattttcttgagggtgataaatcacatcattgcgatctatatcacctccttgagaatctctcccaggctgaaaatgtgatggtaatcatgggtgtttttaagaacaaatctaatttttatcaagtgttctttcctctacaaaaaaggaaggaggagaaaaagcttccttaaaactgattattttgattcaattttaagtttctaaaaaaggtgatattaaagtatatgtattccttcagcattaccttaaaggctagaaaaacgggataaatcttcagaaaagtgtcaaaagtgtcacagtacatgttcaaatttaaacttgaatcctggttcatctttgacttttgttgtgcatttttaatgcttctttatttttgatacacagaatgcagttgaacttgatcttttaaaattgagacatgtaagctaatcagcaaaagacagaaacaaaactgcacatctgtaataatcagatagcaattctactgcacaattcattgattgtaaggtatcctgtaacaagcaatgtttgtctcctattttttgatacctcttaaacttatgtcttttagaaagacagtgcctctgtatgctttttgtatttttactgagtgtaaatatttgttatatttttggttaagagaatgtaaaaataccatttattattatcatatctactaatacattggtggaatcaataaagaatctacattaatcttctctgtacttaattataaatgtatggaactgatgaaataattacaaacttagtcattcgagagtgccagtctgggacctgtgttggtgtgaaggccttattttttaactatccagaaaaattggagtggtccatttgttgttggttatgtcaaatctgtgaaacaccatagctattgtttaggtttaaaaaattgtgtttgatggcataccaagttaacagtggcttaaactcaattggggcttgtctttttgttattgttgtctgtttctttttcttcttacagtagaaaagtctacagacaaaactgtccggggctgatactgtaactcctccacgatgctgtcaaggatggcaaaagtaggggtgaaaaggataggcttaggtaaggaaaaggtgcaaatatgtgtctctttctacgcaaagagaacaaaacagtagtttccagaagctccacttgcatgtttgtacttacatcccattagttagacctctgttgcatgactggtagctccaagggtgccttggaaattatctattttatctgagcaattgatgttcctaacaaatttaggactcttcagtgaagaaggaaagaatagatttcaaatgggcagccagctgggtctacgaaagcatgcctattgccccctcttttgggcagtatatgtaaatacagccacttttatgggattagatcccaggaccctggcaaagtagaaggaaattctactttagctccttttttaaaatctcctcacagttttccctcggtacccagagaatgttactcccattatagctaagacttctaccttcttccagttcaccccctcttcaccaggttttcccaggccattctgtccccctgaccatctctccacagtctcactagtttctttatttagaaaatatatttcttcaccgggcatggtggctcacgcctgttatcccagcactttgggaggccgaggcaggcggatcacgaggtcaggagttcaggaccagcctggccaacatggtgaaaccccgtttctactaaaaatacaaaaactagcggggcatggtggcggggtcgtgtaatcccagctactttggaggctgaggtaggagaatctcttgaactcaggaggcggaggttgcagtgagccaagactgcaccattgcactccagcctgggcagcgagcaaaactgtctcaaaaaaaaaaaaaaaagaaaagaaaaaatacacatatttatatttgtatcagatggcactggtgaaatgaaattttttttaagtagaaaataagtataattgaaaaacggctaccccaaaatatcaagctctaatccctggagaacttgtaaatattactttatttggaaaaagggtctctgcagatgtaattaagcattttagagatgagattatgagtggggcctgaatgccatcacaagtgcccttgtaagagaaacaaaggaagataccagaagaaggcaacatgaagatggcagagagggatgtagccacaagtcgagtaatgttgacagcttccaggagctagaagagacaaggaaggtattctctcctagagcctctagaggaaatggtgccttgccaacatcttgattttggatttctggcctccaaaatggtgagatgatgaatttctgttgtcttaaagccacccgatttgttgtaatctgttacagcaactctaggaaacaaatgcaagttactatatatgtctgatgtcagaaatccagtccctgcagttaaggatgtgttggtccagaaatacacttcctttaacttcttccacccccaagaagcacttgatagacgaagagaagaactggctctcccagaaggtgcctctggagaagcctggtcagcctattatttttctcatttcagacattctggtaagtatatactggtatcttgtggtttaaattttaatagtgactaataatgctaggcatcttttcaaatacttattgaccatttggaccattttgtgaagtctattcaggtctgtaattgtttactatttgttgctacagtattgaactattgatttttataatgaccttatatctagctctcttgctcagttcatttattaatgctaacaatttgtggattctcttggaattttctgcatactcatatctgttcataataacttatttatttctagtcattttgtattttcttttcttgtcttttgttgttgttgttgttgttgttattgagacggagtctcgctcttttgcccaggccggactgcgtggtgctatctcggctcactgcaagctctgcctcccaggttcacgccattctcctgcctcagcctcccgagtagctgggactacaggcacccaccactgcgcctggctaatttttcgtatttttttttttttaagtagagacagagtttcaccgtgttagccagggtggtctcgatctcctgacctcgtgatccgcccgcctcggcctcccaaagtgctggtttcttttcttgtcttactgcactggccaaaatgcccagtatagtgttgaatagaagtggtcagagtgggccagatccagtggctcacacctgtaatcccagcaccttgggaggccgaggtgggaggattgcttgagcccgggagttcgagaccatcctggacaacatggtgaaaccccatctctacaaaaaattagctgggtgtgccagtgcacagctgtggtcccagctacttaaaaggcttagttggtagaaggatcacttgagcctaggaggtgagctttgatcacactactgcattccagcctgggtgacagagtgagaccctgtctcaaaaagtggtcagaatggaattcctttctttgttcctgatctcagcgagaacgcattcggatgtcaccgttgagcatagtgattgctgtaggattttggtggtatttatgagtttaaggaagttttatttataccttgctaagaaagtatatgctgttgaattatgtcaaatgcttttcttgaatttattgagatgatcaaattatttttctcttacctgttagtctagtgaattaataatatatttcatagtgttaattcctccgtgtctactcctgccctcctacctcaccattcgttttgttagaataaacttcctacttagtcatgttatttctgtgtatctctggatttattttgcaatatttctttcttttttttttttttcatttgagacagagtctcgctctgttgcccaggctggagtgcagtggcgtgatcttggctcactgcaagctccgcctcctgggttcacaccattctcctgcctcagcctcccgagtagctgggactacaggctcctgccaccacgcccagctaatttttttgtgtttttagtagagacaggatttcaccgcgttcgcccggatggtctcgatctcctgacctcgtgatccgcccacctcagcctcctaaagtgctgagattacaggagtgagccactgcgcccggctgcaatatttcatttagaattttagcatctgtattcaagagagaggtggtgtataattttcctttcttttcatacccttgtcagattttggtgttaatgtaaaaatgtcctcgtggaaagagctggaagttgtttcctctttgtctattcttgggagagtttatgaaagattgaactgtagccctttagcctccctgactcttgcctctgtctcttaaaatctggaaaaattggtggactctggtctgggtttcccctcccttgcattatggcctagaaatgttgttcaggaaataaattctggggcagcggcagggcttacctcttttgtttcatgttcggtcagcagttactgttcttcagtgcctgatggcccgtgtcttaagtgacattgttttacctacgttgttcagttttttagttgcttcaggcaggaggatagagtgacaggtattccatcttgaccaaaagtagaagtctatatataagattttaacacagctgtctcaggaaatgatagaagcacacacacacacacacacacacacacacacacacacacacacacaccccttcccaccaaatcagtaaggaaatagtgattggaacaacatagtgaacaaacttaatctaatgggcctgtatagaacactgtatcaataactgcaaaatatatgttatttacagatgaacatggatcatttatcaaagttgaataaatgttaggccataaagaaacttactaataaatttcagagggcttaaatcatatagagaaggcagtctgattacagaagaactaaataaaaattatgaaatttggaagaaatgtagctccaaatccagtggaaaatggaaagtattttgaaccgaattgaaatgaaaataagaatatcagaaccttttggatatgattacccaggcgtggtggcgagtgtctgtagtcccagctactcgggaggctgaggcacgagaattgctttttgaaaaaataattggtaaacccttggtgaaaatgatcaagggaaaaaatggcagaactaaccagtgttggagatggaaaagaattattatttggtgggcgggggtggggacaggatcttgttctgttgcccaggctggggtgcagtggtacagtcatagctcattgcagcctcaacctcaagtgatctcccacctcggtcttctgagtagctgagattacaggtgtgcccggctacttatttattttatttttttaaagagaaatgagatatcactatattccctgggctggtcttgaattcctgagctcaagcaatcctcccaccttggcctccccaagtgctggcgttacaggcatgagccactgtacccaaccaaagaattattttatttatatatatatattttttaatttatatatattttttatttatgtatacttatatatgtgtatatataaataaaatatattttttatttatatataaaatatatatttatatatacgtatatatacatgtatatatacgtatacatatatatgtgtatatgtatacgtatatatacatgtatatatacgtatatataaatatatatttatgtacatatatgtgtgtgtgtgtgtatatatatatatatatatatatttttttttttttttttttttttttttttgagaaggagtctcgctctctcacccaggctggagtgcagttgcgtgatcttggctcactgcaacctctgcctcccaggttcaagcaattctcctgcctcagcctcctgagtaattgggactacaggcgcatgctaccacacccggctaactttttgtatttttagtagagacagagtttcaccgtgttagccaggatggtcttgatctcctgaccttgtgacccacccacctcagccagaattactataattacaaagaaattagagagatattaagacactttgagtaagtaaaatgtacatgaaatatacaaattcatagaaaacacagcttaacaaaactataacaagatggaaaacttcatagtcctctattaaagaaattaaatcctctttaaaagcttttccacagagaaaacttcagtcttggatgactttactggtaagttctaccaaacacttacagaagaaataacaaagttgtataacaaaatttcagaagtaataaggatttcttttttctttttctttttttttttttttgagacagagtctcactctgtcacccaagctggagtgcagtggcactgtcttggctcactgcaacctccgccttccaggttcaagcgattctcctgcctcagcctcccaagcagcttgggattacaggtgcgcaccactgcgcccgactgatttttgtatgtattttttttagtagcgacagggtttgaccgtgttggccaggctgttcttgaactcctgacctcaagtggtctgcccacttcggcctcccaaagtgctgggattacaggcgcctggccaggattccttaaataaggtaaaagaaaatgtaactctaaatgaagtgattgatatatttgactatactagaatgcattcaccaaaaaacaccatttacaaaaacaaaaagcctgtagagttgggaaatatattaattcatataaccgtcaaaggacaggtgtccaggtatgtaaagtacttctgtataccaaagaaaaggaacacccaatagaaaaatgggcaaaaaccttaatgaagcacttcataaaagaaaaaattatctaataaacatacagagaagtgctttatctcattctgtaaaactctgcataggttcggaattggccatggcgaagtgttaactgtgctgctgtctaatgtggaatgtagtggcagatgaacctgggaagaggagaaacaagaaaagggctgaaagggggaagagatggtagaagaaaaaaaatacgttggatacagtggaaccaccaggtggcgccacgctacaatatgactcttggaagtctccttttaaagagagagcaaggtaatttcttagtcgtcattgcagatgtttctgcagccaatagtgaaatatttgacaaaattgaagcatttccaaaccaggaaatgtcatagaattttaggttctagttggataatctttggataacagtgaatgatagtatggtattagcaatactctaatatgtatattgtttgtaaatgtgggcataggatttgcaatactcagtaagcattggattttttcagggaccacaagagaaacctaccagaaaatacaaatggtccaactctgaatgggaatgaaaaacatacctgtacaaaatatgcactaaaaaaaaaaaatcagaagtctaacaatatatattgaacaactgtgtattacaaagactccctggcaagttctcatctgttctgaccagttggtattttcagcgttcttctttcactttggccattttggttggtatgtaatggtattgtggttttagtttgcatttccctagttattagtggggttgagcacctttttcatattactataggccatttcctcttttatgaaatgcctttgtaagtattcttttctaaatcgatttcgaggtgttctttatatattctggatctgactcctttgtcagctatacctgtggcaaatagcttgtccctctctgacttgctttgtcatacacttaatggtgtctcttgagaagttcttaactttaaactagagaaatgtattattcttttcctttatagttagtgctttttgtgttgcagggtttttattaaatcattttctactgacttttttttttttgaaatggagccttgttctgtagcctaggctagagtgcagtggcgccatctcagctcactgcagcctctgcctcctgggttcaagtgattctcctgcctcagcttcccgagtagctggatttatagatgtccaccaccactcccgtctaatttttgtatttttagtagagacagggtttcaccatgttggccaggctagtctcaaactcctgacctcaagtaatccacccacctcagcctcccaaagtgttggaattacaggcgtgagccactgcacccagcctttgtgttctgcttaagaagtccttactctaagttcatgattatattctgtgttacattttaaatgttttgccttttaaatttagctctaaaacagatctggaatagatgtttatgtgtagtatgaggtaggagtcaggtttcattcctctacctacagattgttcctgcaccatttattgaaaagacattttgtctagtgcacttcactgccatctttgctgtaaatcaagtgtccatatatacttgagtgtccagtatacttgagtttatttctggggtctgtattctgtttcattagcctgtttatttctccattttccaataccacactcttaattactctagtattacacatatcaatatcttaatgagaaagttctctaaccctgttctccttttttgatgtcttgtatcattgtatttccaaaaaattttagaaccagcttaccaacttacacacaagtacacttacacatatgcatacaattgcaattttcattgtgattttcttgaatctatatatcattttgaaggagagtaacatcttgaaatttagtcttctgatctatgaatgtagtatatttctccacttagattttctattgctctgttttattgttttggtttaagagtttcatactttttatgtaagatttatttttaagcagtatgtttgatgctattataaatagtagcttctaaattttcagttgttaattattctctcttttaagagatggtttcttgctctgttgcccaggctggagtgcagtggtgcaatcacagctgactatagcctcgacctcctccaaggtagaagggactacaagtgcacaccacatggacccagctaattttttaatgtttttgtagagacggggtctactaattttgcccaagctggtcttgaactcctaggctcaagtgattctcctgccttggctttccaaagtgttgggattacacttacgagccactgtgcccagactttgattattttttgtcaaatagaaataaaattgattttttaatgttgttccagtgtccaacagtcttaccaaactcactgaatcctaataataataataatctcagattttctatatagacatgtaatctgcagctaaaggcagttctatttcttcctttctaattcttatgccttttattttttcagttacccagaacttccaatataatgaatagaagtgatgatagagaaaaactgtcaacaataaatacactgtgtgcagtaagttttatgtattaactctttgtcagattaagaaagtt

SEQ ID NO: 235 - DNA, 6257 bp, Homo sapiens
ccccgcgcagacttgtctccggccagtcgcgcgtgggtagaggccttaggcgggcgttgcgaagggttgtttgctagagttcggaccttgttacggcgcgaagttccctccttggggcgggggaaaggtaccgcacccgctacctagtgtgaatgaactgtggcgtgggctgctaagggcaggctgcggagtacccgggccgtggccatgaactcacccgtggaccctggcgctaggcaggcgttgaggaagaagccacccgagcggactcccgaggacttaaatactatttattcttatcttcatggaatggaaatattatcaaatctcagggaacatcagcttagattaatgtctgcaagagcacgctatgagagatacagtggcaatcaggttctcttttgttcagaaacgattgccagatgttggtatatcctactttctggatctgtgcttgtgaaaggctccatggtcttgcctccttgcagttttggtaagcagtttggaggaaaaagaggatgtgattgtcttgtattagagccttcagaaatgattgtggtagagaatgccaaagataatgaagatagtattctacaaagagaaattcctgccagacaatcccgaagaagatttcggaaaattaactataaaggagagcgccaaaccattactgatgatgtggaggttaacagctatctttctcttccagctgatcttaccaagatgcatctcacagaaaaccctcatccacaggtgactcatgtgtcttctagtcagtctggttgtagcattgccagtgactctggaagcagcagtttatctgatatctatcaggctacggagagtgaggtaggagatgtagatttgacacgtcttccagaaggacctgttgattctgaggatgacgaagaggaagatgaagagattgatcgaacagatccattgcaggggcgagatcttgttcgagaatgtcttgaaaaagaacctgcagacaaaactgatgatgacattgaacaattgctggagtttatgcaccagctccctgcatttgcaaacatgaccatgtctgtaaggagagaactctgctcagtgatgatttttgaagtggtagagcaggctggagctattattcttgaagatgggcaagagcttgactcatggtatgttattttaaacggcactgtggaaatcagtcatccagatggaaaagttgaaaatttgtttatgggaaatagttttggaattactcccactctggataagcagtacatgcatggaattgtcaggactaaagtagatgattgtcagtttgtctgcatagcccagcaagattattggagaattttaaaccatgtggaaaaaaatacccataaagttgaggaagagggagaaattgttatggtacatgagcatcgggaactagaccggagtggaaccaggaaaggacacattgtgatcaaggcaacacctgagcgtctcataatgcatttaatagaagaacattccatcgtggatccaacttatatagaagattttctattaacttacaggacatttcttgaaagtcctttggatgttgggatcaaactattggaatggtttaagatcgacagcttaagagataaggtgacacggattgtattattatgggtaaataatcattttaatgattttgaaggtgaccctgctatgactcgatttctagaggaatttgaaaaaaatctggaagatacaaagatgaatggtcatctccggttattgaatattgcctgtgctgcaaaggctaagtggagacaggttgtgctgcaaaaggcttcccgcgagtcccctctacaattcagccttaatggagggagtgagaagggatttggtatttttgttgaaggagtagaacctggtagcaaagctgctgattcaggactgaaacgtggtgatcagattatggaagtaaatggacaaaactttgagaatattacatttatgaaagccgttgaaattttgaggaataatactcatcttgcacttactgtgaagaccaacatttttgtgttcaaagagttactttttaggactgaacaagagaaatctggtgttcctcatattcccaaaattgctgaaaaaaaaagtaatcgccattctatccagcatgtgccaggagatattgaacagacatcacaggagaaaggaagtaagaaagttaaagcaaatactgtttcaggtggaagaaacaaaatcaggaagattttggataaaacacgatttagtatcttgcctccaaagctatttagtgatggaggcctaagccaatcacaagatgacagcattgtgggaacaaggcactgtaggcatagtctggctataatgcccatccctggaacactctcatccagcagccctgatctcctgcagcctaccaccagtatgttggatttttccaatccttcagcatatctttctatttatgtagatatccctgatcaagttataagagttttcaaagtggatcagcaaagttgctacattatcatcagtaaagacaccacagctaaagaagtagtttttcatgctgttcatgaatttggtttgaccggtgcatccgacacatattctctctgtgaagtttctgttactcctgagggtgtcataaaacagagaagacttccagatcagttctccaaattagctgatagaattcaactcaatggaaggtattacttaaaaaataacatggaaacagaaaccttatgttcagatgaagatgctcaagaactagttaaggaaagccagctatccatgctgcagctcagtaccattgaggtggccacccagctgtcaatgagggactttgatttgtttcgtaatattgaaccgactgagtacatcgatgacctttttaagttaaattccaaaacaggaaatactcatttgaagaggtttgaggacattgtaaaccaagagacattctgggttgcctcagaaattttaactgaagcaaatcagctcaaacgaatgaagattattaagcattttattaaaattgcacttcattgtcgagaatgtaagaacttcaattccatgtttgcaataataagtggcttgaacctggcatctgtagcaagactcagaggaacttgggaaaagttaccaagcaaatacgagaaacatcttcaagatctacaagacatttttgatccatctagaaacatggcaaagtatagaaatattcttagtagtcaaagtatgcagcctccaattattccactcttccctgttgtcaagaaagatatgacatttctacatgaaggaaatgactccaaagtagatggtttagtaaactttgagaagttaagaatgatttccaaggaaatccgccaagttgttcgaatgacttctgctaacatggacccagctatgatgtttcgacagaggaagaagaggtggcggagtctggggtcactgagtcaaggaagcacaaattcaaacatgctggatgttcagggaggtgctcacaaaaaaagggcacgccgcagctctctgcttaatgccaagaagctatatgaggatgcccaaatggcaaggaaggtgaagcagtatctttccagtctcgatgtagagacagatgaggagaagttccagatgatgtcattacagtgggagcctgcatatggtaccttgaccaagaatttaagtgagaaaagatcagccaaatcatctgaaatgtctccagtgcctatgaggtcagctggccaaacaactaaagcccacttgcatcaaccccacagagtaagccaggtgcttcaggtgccagctgttaatttgcaccccatcaggaagaagggacaaacaaaagaccctgcactgaatacaagtttacctcagaaagttttaggaacaactgaagaaataagtggtaagaagcatacagaagacactatttctgtggcgtcatctttacattctagtcctcctgcatctcctcaaggctcccctcacaaaggttacacacttattccatcagctaaatctgacaacttgtctgactccagccatagtgagatttcttcacggtccagcatcgtgagcaattgttctgttgactccatgtctgcagctctacaggatgaacggtgttcctctcaggccctggcagtccctgaatccactggggcattggaaaagacagagcacgcttcagggataggagatcatagtcaacatggccctgggtggacactcttgaagccatctctaatcaagtgtttagctgtctcatcgtctgtgagcaatgaagagatttctcaagagcatatcattatagaagcagctgacagtggtcgtggaagttggacttcgtgttcaagcagctcccatgacaacttccaaagccttccaaacccaaaaagctgggattttttgaactcttacagacatacccatttggatgaccccattgctgaagttgaacccactgactctgagccctattcctgttctaaaagctgctctagaacttgtgggcagtgtaaaggaagcctagagagaaagagttggacctcctccagttctctgtctgacacgtatgaaccaaactatgggacagttaaacggagagtattggagagcaccccagctgagtcatctgaaggcttggaccccaaggatgccactgacccagtttataaaactgtcacttcaagtacagaaaagggcttgattgaaaatgaacaagtttcagcagtctagcctttggatgacctatttgaaaaccactgaaagtcgtggaggaatgggcaagaaccacctcatgattctgcaggccattgctaacgaacagctcattgctacaaccagtccagaggttttattccctctactccgagcaatgaaatagacctgagttatgcttcctttcatttaatttctgcagataaatagtttcctgagcaatggatgctatgcctggataccagtctccactttgcacgccggaactgccttgggaccacagttacagaaaaaatgtaaactcagagtgatccttgtgtatattgctatagatttttctttaacaagctattttaaagataatggcattattatttccaagccatagcttgggctgaaggacaaattgaaattgtctgccaataccaaggatattcttgtatatttgaaaaataacttattatttgaattgttgtggttttgtttgtatttgagagctcttgttagctgatattcatgtttgaggtcataaaattgtctctggtctgaccaaacagaagtcatctttacagaggtgatatgcttgatctacacagagatgtgacttgatctgtagcaccaatgcaatgtaggtctcagtttgagagaaataggaagccctttgcagttgaggtgttaggaacctgctggtcatggtgtggaaggccaaatgaagctgccacagggtttcttgtcagtcctttgggaaatgggagggagtagtttggggaggagggtgggaaccctaatttccacagaatgaaattttgatgttaaatgacatgtatacaaattcttccttaagtgaaagttatgctgcatcgaattgtaactgaaagtatagatccaacaaatagagactgggttctagagagttctggtctatagaaacccaaaactaaaatctctcataactcaagtatggaatactttttttaaagaaattcttatcatgggtgttgtaataatgaagacgaatttgactttatgcagtgttctgcagcatgcctcccccacatctcatagcaccaggttgtgtctgacctgacataccctgcagctctcagctggctgcagtaacattttgtgggagaaagaggagctggagttacagaaatgattgtctcttggttctcagtttttagcccttgagaggacatacttttccagcctcatgggtatggcactcttaattaaaatttcagtgactgtttactggatgaggcagatttttcacatttttgcaaattaaatatattttatatatattaagtttaattttttcagtttttttaatgtaaaagcaagtgaaattttaataaacttctgtaattaccaaaaaaaaaaaaaaaaaaaaagccaaagccattaacgtgcactacccagatcaacttggagccaaaaggggtttacttctgaatggtctgaaacttaagccttagaaattaatcgcaggtatgatagaatgaggcttggtggttccatagctttct

SEQ ID NO: 236 - protein, 1499 aa, Homo sapiens
MNSPVDPGARQALRKKPPERTPEDLNTIYSYLHGMEILSNLREHQLRLMSARARYERYSGNQVLFCSETIARCWYILLSGSVLVKGSMVLPPCSFGKQFGGKRGCDCLVLEPSEMIVVENAKDNEDSILQREIPARQSRRRFRKINYKGERQTITDDVEVNSYLSLPADLTKMHLTENPHPQVTHVSSSQSGCSIASDSGSSSLSDIYQATESEVGDVDLTRLPEGPVDSEDDEEEDEEIDRTDPLQGRDLVRECLEKEPADKTDDDIEQLLEFMHQLPAFANMTMSVRRELCSVMIFEVVEQAGAIIDGQELDSWYVILNGTVEISHPDGKVENLFMGNSFGITPTLDKQYMHGIVRTKVDDCQFVCIAQQDYWRILNHVEKNTHKVEEEGEIVMVHEHRELDRSGTRKGHIVIKATPERLIMHLIEEHSIVDPTYIEDFLLYTFLESPLDVGIKLLEWFKIDSLRDKVTRIVLLWVNNHFNDFEGDPAMTRFLEEFEKNLEDTKMNGHLRLLNIACAAKAKWRQVVLQKASRESPLQFSLNGGSEKGFGIFVEGVEPGSKAADSGLKRGDQIMEVNGQNFENITFMKAVEILRNNTHLALTVKTNIFVFKELLFRTEQEKSGVPHIPKIAEKKSNRHSIQHVPGDIEQTSQEKGSKKVKANTVSGGRNKIRKILDKTRFSILPPKLFSDGGLSQSQDDSIVGTRHCRHSLAIMPIPGTLSSSSPDLLQPTTSMLDFSNPSAYLSIYVDIPDQVIRVFKVDQQSCYIIISKDTTAKEVVFHAVHEFGLTGASDTYSLCEVSVTPEGVIKQRRLPDQFSKLADRIQLNGRYYLKNNMETLCSDEDAQELVKESQLSMLQLSTIEVATQLSMRDFDLFRNIEPTEYIDDLFKLNSKTGNTHLKRFEDIVNQETFWVASEILTEANQLKRMKIIKHFIKIALHCRECKNFNSMFAIISQLASVARLRGTWEKLPSKYEKHLQDLQDIFDPSRNMAKYRNILSSQSMQPPIIPLFPVVKKDMTFLHEGNDSKVDGLVNFEKLRMISKEIRQVVRMTSANMDPAMMFRQRKKRWRSLGSLSQGSTNSNMLDVQGGAHKKRARRSSLLNAKKLYEDAQMARKVKQYLSSLDVETDEEKFQMMSLQWEPAYGTLTKNLSEKRSAKSSEMSPVPMRSAGQTTKAHLHQPHRVSQVLQVPAVNLHPIRKKGQTKDPALNTSLPQKVLGTTEEISGKKHTEDTISVASSLHSSPPDQGSPHKGYTLIPSAKSDNLSDSSHSEISSRSSIVSNCSVDSMSAALQDERCSSQAVPESTGALEKTEHASGIGDHSQHGPGWTLLKPSLIKCLAVSSSVSNEEISQEHIIIEAADSGRGSWTSCSSSSHDNFQSLPNPKSWDFLNSYRHTHLDDPIAEVEPTDSEPYSCSKSCSRTCGQCKGSLERKSWTSSSSLSDTYEPNYGTVKRRVLESTPAESSEGLDPKDATDPVYKTVTSSTEKGLIENEQVSAV

SEQ ID NO: 237 - DNA, 4447 bp, Homo sapiens
tgtcatatgactgaggcgcccatgggggtggcggggcggctgtaggagcaggggcctagcaagcgcccagcggagcgacccctgcctggccgtggctagcatggcccctacgctgttccagaagctcttcagcaagaggaccgggctgggcgcgcccggccgcgacgcccgggacccagattgcgggttcagttggcctttaccagagtttgatccaagccagattcgactgattgtatatcaagactgtgaaagacgagggagaaatgttttgtttgactccagtgttaagagaagaaatgaggacatatcagtatcggacttaaatactatttattcttatcttcatggaatggaaatattatcaaatctcagggaacatcagcttagattaatgtctgcaagagcacgctatgagagatacagtggcaatcaggttctcttttgttcagaaacgattgccagatgttggtatatcctactttctggatctgtgcttgtgaaaggctccatggtcttgcctccttgcagttttggtaagcagtttggaggaaaaagaggatgtgattgtcttgtattagagccttcagaaatgattgtggtagagaatgccaaagataatgaagatagtattctacaaagagaaattcctgccagacaatcccgaagaagatttcggaaaattaactataaaggagagcgccaaaccattactgatgatgtggaggttaacagctatctttctcttccagctgatcttaccaagatgcatctcacagaaaaccctcatccacaggtgactcatgtgtcttctagtcagtctggttgtagcattgccagtgactctggaagcagcagtttatctgatatctatcaggctacggagagtgaggtaggagatgtagatttgacacgtcttccagaaggacctgttgattctgaggatgacgaagaggaagatgaagagattgatcgaacagatccattgcaggggcgagatcttgttcgagaatgtcttgaaaaagaacctgcagacaaaactgatgatgacattgaacaattgctggagtttatgcaccagctccctgcatttgcaaacatgaccatgtctgtaaggagagaactctgctcagtgatgatttttgaagtggtagagcaggctggagctattattcttgaagatgggcaagagcttgactcatggtatgttattttaaacggcactgtggaaatcagtcatccagatggaaaagttgaaaatttgtttatgggaaatagttttggaattactcccactctggataagcagtacatgcatggaattgtcaggactaaagtagatgattgtcagtttgtctgcatagcccagcaagattattggagaattttaaaccatgtggaaaaaaatacccataaagttgaggaagagggagaaattgttatggtacatgagcatcgggaactagaccggagtggaaccaggaaaggacacattgtgatcaaggcaacacctgagcgtctcataatgcatttaatagaagaacattccatcgtggatccaacttatatagaagattttctattaacttacaggacatttcttgaaagtcctttggatgttgggatcaaactattggaatggtttaagatcgacagcttaagagataaggtgacacggattgtattattatgggtaaataatcattttaatgattttgaaggtgaccctgctatgactcgatttctagaggaatttgaaaaaaatctggaagatacaaagatgaatggtcatctccggttattgaatattgcctgtgctgcaaaggctaagtggagacaggttgtgctgcaaaaggcttcccgcgagtcccctctacaattcagccttaatggagggagtgagaagggatttggtatttttgttgaaggagtagaacctggtagcaaagctgctgattcaggactgaaacgtggtgatcagattatggaagtaaatggacaaaactttgagaatattacatttatgaaagccgttgaaattttgaggaataatactcatcttgcacttactgtgaagaccaacatttttgtgttcaaagagttactttttaggactgaacaagagaaatctggtgttcctcatattcccaaaattgctgaaaaaaaaagtaatcgccattctatccagcatgtgccaggagatattgaacagacatcacaggagaaaggaagtaagaaagttaaagcaaatactgtttcaggtggaagaaacaaaatcaggaagattttggataaaacacgatttagtatcttgcctccaaagctatttagtgatggaggcctaagccaatcacaagatgacagcattgtgggaacaaggcactgtaggcatagtctggctataatgcccatccctggaacactctcatccagcagccctgatctcctgcagcctaccaccagtatgttggatttttccaatccttcagatatccctgatcaagttataagagttttcaaagtggatcagcaaagttgctacattatcatcagtaaagacaccacagctaaagaagtagtttttcatgctgttcatgaatttggtttgaccggtgcatccgacacatattctctctgtgaagtttctgttactcctgagggtgtcataaaacagagaagacttccagatcagttctccaaattagctgatagaattcaactcaatggaaggtattacttaaaaaataacatggaaacagaaaccttatgttcagatgaagatgctcaagaactagttaaggaaagccagctatccatgctgcagctcagtaccattgaggtggccacccagctgtcaatgagggactttgatttgtttcgtaatattgaaccgactgagtacatcgatgacctttttaagttaaattccaaaacaggaaatactcatttgaagaggtttgaggacattgtaaaccaagagacattctgggttgcctcagaaattttaactgaagcaaatcagctcaaacgaatgaagattattaagcattttattaaaattgcacttcattgtcgagaatgtaagaacttcaattccatgtttgcaataataagtggcttgaacctggcatctgtagcaagactcagaggaacttgggaaaagttaccaagcaaatacgagaaacatcttcaagatctacaagacatttttgatccatctagaaacatggcaaagtatagaaatattcttagtagtcaaagtatgcagcctccaattattccactcttccctgttgtcaagaaagatatgacatttctacatgaaggaaatgactccaaagtagatggtttagtaaactttgagaagttaagaatgatttccaaggaaatccgccaagttgttcgaatgacttctgctaacatggacccagctatgatgtttcgacagaggaagaagaggtggcggagtctggggtcactgagtcaaggaagcacaaattcaaacatgctggatgttcagggaggtgctcacaaaaaaagggcacgccgcagctctctgcttaatgccaagaagctatatgaggatgcccaaatggcaaggaaggtgaagcagtatctttccagtctcgatgtagagacagatgaggagaagttccagatgatgtcattacagtgggagcctgcatatggtaccttgaccaagaatttaagtgagaaaagatcagccaaatcatctgaaatgtctccagtgcctatgaggtcagctggccaaacaactaaagcccacttgcatcaaccccacagagtaagccaggtgcttcaggtgccagctgttaatttgcaccccatcaggaagaagggacaaacaaaagaccctgcactgaatacaagtttacctcagaaagttttaggaacaactgaagaaataagtggtaagaagcatacagaagacactatttctgtggcgtcatctttacattctagtcctcctgcatctcctcaaggctcccctcacaaagttggcagtatcatatctgatcacagcagcaagatcagtggccagagctgccccggaataggtggggcttacttgcaaaagaaaatccttcagattaccaggagcacagccaaaagaacagacagtactgagaaggccactgaggagaatagagacaggacaagttgtgagaacacaaccagaaaaagaatgacatccccgtttagaagacttagggaaagaatgctttcaagggagagactagtcaacagccaaaaagaggacacagatcacaatcaagctacagaaagctgtgagaaagtgaaggatgttggaagcaacatcaaagatgagaaagggagtgccatcttcaattcaaatagccaaggcaacagtaacactttaaactgcttctatacgcgattcaagtctaaaaggaggaagacactc

SEQ ID NO: 238 - protein, 1439 aa, Homo sapiens
MAPTLFQKLFSKRTGLGAPGRDARDPDCGFSWPLPEFDPSQIRLIVYQDCERRGRNVLFDSSVKRRNEDISVSDLNTIYSYLHGMEILSNLREHQLRLMSARARYERYSGNQVLFCSETIARCWYILLSGSVLVKGSMVLPPCSFGKQFGGKRGCDCLVLEPSEMIVVENAKDNEDSILQREIPARQSRRRFRKINYKGERQTITDDVEVNSYLSLPADLTKMHLTENPHPQVTHVSSSQSGCSIASDSGSSSLSDIYQATESEVGDVDLTRLPEGPVDSEDDEEEDEEIDRTDPLQGRDLVRECLEKEPADKTDDDIEQLLEFMHQLPAFANMTMSVRRELCSVMIFEVVEQAGAIIDGQELDSWYVILNGTVEISHPDGKVENLFMGNSFGITPTLDKQYMHGIVRTKVDDCQFVCIAQQDYWRILNHVEKNTHKVEEEGEIVMVHEHRELDRSGTRKGHIVIKATPERLIMHLIEEHSIVDPTYIEDFLLYTFLESPLDVGIKLLEWFKIDSLRDKVTRIVLLWVNNHFNDFEGDPAMTRFLEEFEKNLEDTKMNGHLRLLNIACAAKAKWRQVVLQKASRESPLQFSLNGGSEKGFGIFVEGVEPGSKAADSGLKRGDQIMEVNGQNFENITFMKAVEILRNNTHLALTVKTNIFVFKELLFRTEQEKSGVPHIPKIAEKKSNRHSIQHVPGDIEQTSQEKGSKKVKANTVSGGRNKIRKILDKTRFSILPPKLFSDGGLSQSQDDSIVGTRHCRHSLAIMPIPGTLSSSSPDLLQPTTSMLDFSNPSDIPDQVIRVFKVDQQSCYIIISKDTTAKEVVFHAVHEFGLTGASDTYSLCEVSVTPEGVIKQRRLPDQFSKLADRIQLNGRYYLKNNMETLCSDEDAQELVKESQLSMLQLSTIEVATQLSMRDFDLFRNIEPTEYIDDLFKLNSKTGNTHLKRFEDIVNQETFWVASEILTEANQLKRMKIIKHFIKIALHCRECKNFNSMFAIISQLASVARLRGTWEKLPSKYEKHLQDLQDIFDPSRNMAKYRNILSSQSMQPPIIPLFPVVKKDMTFLHEGNDSKVDGLVNFEKLRMISKEIRQVVRMTSANMDPAMMFRQRKKRWRSLGSLSQGSTNSNMLDVQGGAHKKRARRSSLLNAKKLYEDAQMARKVKQYLSSLDVETDEEKFQMMSLQWEPAYGTLTKNLSEKRSAKSSEMSPVPMRSAGQTTKAHLHQPHRVSQVLQVPAVNLHPIRKKGQTKDPALNTSLPQKVLGTTEEISGKKHTEDTISVASSLHSSPPDQGSPHKVGSIISDHSSKISGQSCPGIGGAYLQKKILQITRSTAKRTDSTEKATEENRDRTSCENTTRKRMTSPFRRLRERMLSRERLVNSQKEDTDHNQATESCEKVKDVGSNIKDEKGSAIFNSNSQGNSNTLNCFYTRFKSKRRKTL

SEQ ID NO: 239 - DNA, 1624 bp, Homo sapiens
tgtcatatgactgaggcgcccatgggggtggcggggcggctgtaggagcaggggcctagcaagcgcccagcggagcgacccctgcctggccgtggctagcatggcccctacgctgttccagaagctcttcagcaagaggaccgggctgggcgcgcccggccgcgacgcccgggacccagattgcgggttcagttggcctttaccagagtttgatccaagccagattcgactgattgtatatcaagactgtgaaagacgagggagaaatgttttgtttgactccagtgttaagagaagaaatgaggacatatcagtatcgaaactctgcagtgatgctcaagttaaagtctttgggaaatgctgccaactgaaacctggaggagacagttcttcctctttagatagttctgtgacttcatcttctgatataaaagaccagtgtcttaagtaccagggttctcggtgctcttctgatgccaatatgcttggagagatgatgtttggctcagtagcaatgagctacaaaggatccaccttaaaaattcatcagattcgttcccctccacagctcatgctcagcaaagtgtttactgctcggactggcagcagtatttgtgggagtctcaatacgctacaagatagtcttgaattcatcaatcaggacaacaatacattaaaggctgataataacacagttattaatggactgcttggaaatataggtctttcacagttctgcagccccaggcgggcattctctgagcagggtccgctccgcctgatcaggagcgcctctttctttgcagttcacagcaacccaatggacatgcctggaagagagctcaatgaggacagagacagtggcatagcacggtctgcatctctcagcagcttgctgatcactccatttccttccccaaactcctcacttacccgaagttgtgccagcagctaccagcgacgttggcgacgcagccaaacaacaagtttggaaaatggggtatttcctagatggtctatagaagaaagctttaatctctcagatgaaagctgtggccctaacccaggaattgtgcggaaaaagaagattgcaattggggtaatcttttcattgtccaaagatgaagatgaaaataacaaatttaatgaattctttttttcacattttcctctctttgaaagccacatgaacaaattaaagagtgcaatagaacaggctatgaaaatgagccggagatcagctgatgccagtcagagaagtttggcatataatcgaatagttgatgccctaaatgaattcagaacaacaatttgtaatctttacacgatgccacgaattggagaacctgtctggcttacaatgatgtcggggactccagaaaagaaccacctttgctatcgtttcatgaaggagttcacctttctaatggaaaatgcttccaaaaatcaattcttgccagctctcattactgcagttctgaccaatcatcttgcctgggttccaacagtcatgccaaatggacaaccacctataaaaatatttttagaaaagcattcctctcagagtgtggacatgttggcaaagactcatccatataacccactttgggcacaactgggtatg

SEQ ID NO: 240 - protein, 508 aa, Homo sapiens
MAPTLFQKLFSKRTGLGAPGRDARDPDCGFSWPLPEFDPSQIRLIVYQDCERRGRNVLFDSSVKRRNEDISVSKLCSDAQVKVFGKCCQLKPGGDSSSSLDSSVTSSSDIKDQCLKYQGSRCSSDANMLGEMMFGSVAMSYKGSTLKIHQIRSPPQLMLSKVFTARTGSSICGSLNTLQDSLEFINQDNNTLKADNNTVINGLLGNIGLSQFCSPRRAFSEQGPLRLIRSASFFAVHSNPMDMPGRELNEDRDSGIARSASLSSLLITPFPSPNSSLTRSCASSYQRRWRRSQTTSLENGVFPRWSIEESFNLSDESCGPNPGIVRKKKIAIGVIFSLSKDEDENNKFNEFFFSHFPLFESHMNKLKSAIEQAMKMSRRSADASQRSLAYNRIVDALNEFRTTICNLYTMPRIGEPVWLTMMSGTPEKNHLCYRFMKEFTFLMENASKNQFLPALITAVLTNHLAWVPTVMPNGQPPIKIFLEKHSSQSVDMLAKTHPYNPLWAQLGM

SEQ ID NO: 241 - DNA, 6527 bp, Homo sapiens
ccccgcgcagacttgtctccggccagtcgcgcgtgggtagaggccttaggcgggcgttgcgaagggttgtttgctagagttcggaccttgttacggcgcgaagttccctccttggggcgggggaaaggtaccgcacccgctacctagtgtgaatgaactgtggcgtgggctgctaagggcaggctgcggagtacccgggccgtggccatgaactcacccgtggaccctggcgctaggcaggcgttgaggaagaagccacccgagcggactcccgaggacttaaatactatttattcttatcttcatggaatggaaatattatcaaatctcagggaacatcagcttagattaatgtctgcaagagcacgctatgagagatacagtggcaatcaggttctcttttgttcagaaacgattgccagatgttggtatatcctactttctggatctgtgcttgtgaaaggctccatggtcttgcctccttgcagttttggtaagcagtttggaggaaaaagaggatgtgattgtcttgtattagagccttcagaaatgattgtggtagagaatgccaaagataatgaagatagtattctacaaagagaaattcctgccagacaatcccgaagaagatttcggaaaattaactataaaggagagcgccaaaccattactgatgatgtggaggttaacagctatctttctcttccagctgatcttaccaagatgcatctcacagaaaaccctcatccacaggtgactcatgtgtcttctagtcagtctggttgtagcattgccagtgactctggaagcagcagtttatctgatatctatcaggctacggagagtgaggtaggagatgtagatttgacacgtcttccagaaggacctgttgattctgaggatgacgaagaggaagatgaagagattgatcgaacagatccattgcaggggcgagatcttgttcgagaatgtcttgaaaaagaacctgcagacaaaactgatgatgacattgaacaattgctggagtttatgcaccagctccctgcatttgcaaacatgaccatgtctgtaaggagagaactctgctcagtgatgatttttgaagtggtagagcaggctggagctattattcttgaagatgggcaagagcttgactcatggtatgttattttaaacggcactgtggaaatcagtcatccagatggaaaagttgaaaatttgtttatgggaaatagttttggaattactcccactctggataagcagtacatgcatggaattgtcaggactaaagtagatgattgtcagtttgtctgcatagcccagcaagattattggagaattttaaaccatgtggaaaaaaatacccataaagttgaggaagagggagaaattgttatggtacatgagcatcgggaactagaccggagtggaaccaggaaaggacacattgtgatcaaggcaacacctgagcgtctcataatgcatttaatagaagaacattccatcgtggatccaacttatatagaagattttctattaacttacaggacatttcttgaaagtcctttggatgttgggatcaaactattggaatggtttaagatcgacagcttaagagataaggtgacacggattgtattattatgggtaaataatcattttaatgattttgaaggtgaccctgctatgactcgatttctagaggaatttgaaaaaaatctggaagatacaaagatgaatggtcatctccggttattgaatattgcctgtgctgcaaaggctaagtggagacaggttgtgctgcaaaaggcttcccgcgagtcccctctacaattcagccttaatggagggagtgagaagggatttggtatttttgttgaaggagtagaacctggtagcaaagctgctgattcaggactgaaacgtggtgatcagattatggaagtaaatggacaaaactttgagaatattacatttatgaaagccgttgaaattttgaggaataatactcatcttgcacttactgtgaagaccaacatttttgtgttcaaagagttactttttaggactgaacaagagaaatctggtgttcctcatattcccaaaattgctgaaaaaaaaagtaatcgccattctatccagcatgtgccaggagatattgaacagacatcacaggagaaaggaagtaagaaagttaaagcaaatactgtttcaggtggaagaaacaaaatcaggaagattttggataaaacacgatttagtatcttgcctccaaagctatttagtgatggaggcctaagccaatcacaagatgacagcattgtgggaacaaggcactgtaggcatagtctggctataatgcccatccctggaacactctcatccagcagccctgatctcctgcagcctaccaccagtatgttggatttttccaatccttcagatatccctgatcaagttataagagttttcaaagtggatcagcaaagttgctacattatcatcagtaaagacaccacagctaaagaagtagtttttcatgctgttcatgaatttggtttgaccggtgcatccgacacatattctctctgtgaagtttctgttactcctgagggtgtcataaaacagagaagacttccagatcagttctccaaattagctgatagaattcaactcaatggaaggtattacttaaaaaataacatggaaacagaaaccttatgttcagatgaagatgctcaagaactagttaaggaaagccagctatccatgctgcagctcagtaccattgaggtggccacccagctgtcaatgagggactttgatttgtttcgtaatattgaaccgactgagtacatcgatgacctttttaagttaaattccaaaacaggaaatactcatttgaagaggtttgaggacattgtaaaccaagagacattctgggttgcctcagaaattttaactgaagcaaatcagctcaaacgaatgaagattattaagcattttattaaaattgcacttcattgtcgagaatgtaagaacttcaattccatgtttgcaataataagtggcttgaacctggcatctgtagcaagactcagaggaacttgggaaaagttaccaagcaaatacgagaaacatcttcaagatctacaagacatttttgatccatctagaaacatggcaaagtatagaaatattcttagtagtcaaagtatgcagcctccaattattccactcttccctgttgtcaagaaagatatgacatttctacatgaaggaaatgactccaaagtagatggtttagtaaactttgagaagttaagaatgatttccaaggaaatccgccaagttgttcgaatgacttctgctaacatggacccagctatgatgtttcgacagaggtcactgagtcaaggaagcacaaattcaaacatgctggatgttcagggaggtgctcacaaaaaaagggcacgccgcagctctctgcttaatgccaagaagctatatgaggatgcccaaatggcaaggaaggtgaagcagtatctttccagtctcgatgtagagacagatgaggagaagttccagatgatgtcattacagtgggagcctgcatatggtaccttgaccaagaatttaagtgagaaaagatcagccaaatcatctgaaatgtctccagtgcctatgaggtcagctggccaaacaactaaagcccacttgcatcaaccccacagagtaagccaggtgcttcaggtgccagctgttaatttgcaccccatcaggaagaagggacaaacaaaagaccctgcactgaatacaagtttacctcagaaagttttaggaacaactgaagaaataagtggtaagaagcatacagaagacactatttctgtggcgtcatctttacattctagtcctcctgcatctcctcaaggctcccctcacaaaggttacacacttattccatcagctaaatctgacaacttgtctgactccagccatagtgagatttcttcacggtccagcatcgtgagcaattgttctgttgactccatgtctgcagctctacaggatgaacggtgttcctctcaggccctggcagtccctgaatccactggggcattggaaaagacagagcacgcttcagggataggagatcatagtcaacatggccctgggtggacactcttgaagccatctctaatcaagtgtttagctgtctcatcgtctgtgagcaatgaagagatttctcaagagcatatcattatagaagcagctgacagtggtcgtggaagttggacttcgtgttcaagcagctcccatgacaacttccaaagccttccaaacccaaaaagctgggattttttgaactcttacagacatacccatttggatgaccccattgctgaagttgaacccactgactctgagccctattcctgttctaaaagctgctctagaacttgtgggcagtgtaaaggaagcctagagagaaagagttggacctcctccagttctctgtctgacacgtatgaaccaaactatgggacagttaaacggagagtattggagagcaccccagctgagtcatctgaaggcttggaccccaaggatgccactgacccagtttataaaactgtcacttcaagtacagaaaagggcttgattgtgtactgtgtcacctcacccaagaaggacgataggtatagggagccacctcccactcctccaggatatttggggatttctttagcggacctaaaggaaggaccccacacacacctaaaacctccagattatagtgtggcagtgcagaggtcaaagatgatgcataacagcctctctagactgccaccagcttctctcagtagcaacctcgtggcctgtgttccatcgaagattgtaactcagcctcagaggcataatttgcagccattccatcctaaactaggagatgtgactgatgcagatagcgaagcagatgaaaatgaacaagtttcagcagtctagcctttggatgacctatttgaaaaccactgaaagtcgtggaggaatgggcaagaaccacctcatgattctgcaggccattgctaacgaacagctcattgctacaaccagtccagaggttttattccctctactccgagcaatgaaatagacctgagttatgcttcctttcatttaatttctgcagataaatagtttcctgagcaatggatgctatgcctggataccagtctccactttgcacgccggaactgccttgggaccacagttacagaaaaaatgtaaactcagagtgatccttgtgtatattgctatagatttttctttaacaagctattttaaagataatggcattattatttccaagccatagcttgggctgaaggacaaattgaaattgtctgccaataccaaggatattcttgtatatttgaaaaataacttattatttgaattgttgtggttttgtttgtatttgagagctcttgttagctgatattcatgtttgaggtcataaaattgtctctggtctgaccaaacagaagtcatctttacagaggtgatatgcttgatctacacagagatgtgacttgatctgtagcaccaatgcaatgtaggtctcagtttgagagaaataggaagccctttgcagttgaggtgttaggaacctgctggtcatggtgtggaaggccaaatgaagctgccacagggtttcttgtcagtcctttgggaaatgggagggagtagtttggggaggagggtgggaaccctaatttccacagaatgaaattttgatgttaaatgacatgtatacaaattcttccttaagtgaaagttatgctgcatcgaattgtaactgaaagtatagatccaacaaatagagactgggttctagagagttctggtctatagaaacccaaaactaaaatctctcataactcaagtatggaatactttttttaaagaaattcttatcatgggtgttgtaataatgaagacgaatttgactttatgcagtgttctgcagcatgcctcccccacatctcatagcaccaggttgtgtctgacctgacataccctgcagctctcagctggctgcagtaacattttgtgggagaaagaggagctggagttacagaaatgattgtctcttggttctcagtttttagcccttgagaggacatacttttccagcctcatgggtatggcactcttaattaaaatttcagtgactgtttactggatgaggcagatttttcacatttttgcaaattaaatatattttatatatattaagtttaattttttcagtttttttaatgtaaaagcaagtgaaattttaataaacttctgtaattaccaaaaaaaaaaaaaaaaaaaaagccaaagccattaacgtgcactacccagatcaacttggagccaaaaggggtttacttctgaatggtctgaaacttaagccttagaaattaatcgcaggtatgatagaatgaggcttggtggttccatagctttct

SEQ ID NO: 242 - protein, 1589 aa, Homo sapiens
MNSPVDPGARQALRKKPPERTPEDLNTIYSYLHGMEILSNLREHQLRLMSARARYERYSGNQVLFCSETIARCWYILLSGSVLVKGSMVLPPCSFGKQFGGKRGCDCLVLEPSEMIVVENAKDNEDSILQREIPARQSRRRFRKINYKGERQTITDDVEVNSYLSLPADLTKMHLTENPHPQVTHVSSSQSGCSIASDSGSSSLSDIYQATESEVGDVDLTRLPEGPVDSEDDEEEDEEIDRTDPLQGRDLVRECLEKEPADKTDDDIEQLLEFMHQLPAFANMTMSVRRELCSVMIFEVVEQAGAIIDGQELDSWYVILNGTVEISHPDGKVENLFMGNSFGITPTLDKQYMHGIVRTKVDDCQFVCIAQQDYWRILNHVEKNTHKVEEEGEIVMVHEHRELDRSGTRKGHIVIKATPERLIMHLIEEHSIVDPTYIEDFLLYTFLESPLDVGIKLLEWFKIDSLRDKVTRIVLLWVNNHFNDFEGDPAMTRFLEEFEKNLEDTKMNGHLRLLNIACAAKAKWRQVVLQKASRESPLQFSLNGGSEKGFGIFVEGVEPGSKAADSGLKRGDQIMEVNGQNFENITFMKAVEILRNNTHLALTVKTNIFVFKELLFRTEQEKSGVPHIPKIAEKKSNRHSIQHVPGDIEQTSQEKGSKKVKANTVSGGRNKIRKILDKTRFSILPPKLFSDGGLSQSQDDSIVGTRHCRHSLAIMPIPGTLSSSSPDLLQPTTSMLDFSNPSDIPDQVIRVFKVDQQSCYIIISKDTTAKEVVFHAVHEFGLTGASDTYSLCEVSVTPEGVIKQRRLPDQFSKLADRIQLNGRYYLKNNMETLCSDEDAQELVKESQLSMLQLSTIEVATQLSMRDFDLFRNIEPTEYIDDLFKLNSKTGNTHLKRFEDIVNQETFWVASEILTEANQLKRMKIIKHFIKIALHCRECKNFNSMFAIISQLASVARLRGTWEKLPSKYEKHLQDLQDIFDPSRNMAKYRNILSSQSMQPPIIPLFPVVKKDMTFLHEGNDSKVDGLVNFEKLRMISKEIRQVVRMTSANMDPAMMFRQRSLSQGSTNSNMLDVQGGAHKKRARRSSLLNAKKLYEDAQMARKVKQYLSSLDVETDEEKFQMMSLQWEPAYGTLTKNLSEKRSAKSSEMSPVPMRSAGQTTKAHLHQPHRVSQVLQVPAVNLHPIRKKGQTKDPALNTSLPQKVLGTTEEISGKKHTEDTISVASSLHSSPPDQGSPHKGYTLIPSAKSDNLSDSSHSEISSRSSIVSNCSVDSMSAALQDERCSSQAVPESTGALEKTEHASGIGDHSQHGPGWTLLKPSLIKCLAVSSSVSNEEISQEHIIIEAADSGRGSWTSCSSSSHDNFQSLPNPKSWDFLNSYRHTHLDDPIAEVEPTDSEPYSCSKSCSRTCGQCKGSLERKSWTSSSSLSDTYEPNYGTVKRRVLESTPAESSEGLDPKDATDPVYKTVTSSTEKGLIVYCVTSPKKDDRYREPPPTPPGYLGISLADLKEGPHTHLKPPDYSVAVQRSKMMHNSLSRLPPASLSSNLVACVPSKIVTQPQRHNLQPFHPKLGDVTDADSEADENEQVSAV

SEQ ID NO: 243 - DNA, 4380 bp, Homo sapiens
ccccgcgcagacttgtctccggccagtcgcgcgtgggtagaggccttaggcgggcgttgcgaagggttgtttgctagagttcggaccttgttacggcgcgaagttccctccttggggcgggggaaaggtaccgcacccgctacctagtgtgaatgaactgtggcgtgggctgctaagggcaggctgcggagtacccgggccgtggccatgaactcacccgtggaccctggcgctaggcaggcgttgaggaagaagccacccgagcggactcccgaggacttaaatactatttattcttatcttcatggaatggaaatattatcaaatctcagggaacatcagcttagattaatgtctgcaagagcacgctatgagagatacagtggcaatcaggttctcttttgttcagaaacgattgccagatgttggtatatcctactttctggatctgtgcttgtgaaaggctccatggtcttgcctccttgcagttttggtaagcagtttggaggaaaaagaggatgtgattgtcttgtattagagccttcagaaatgattgtggtagagaatgccaaagataatgaagatagtattctacaaagagaaattcctgccagacaatcccgaagaagatttcggaaaattaactataaaggagagcgccaaaccattactgatgatgtggaggttaacagctatctttctcttccagctgatcttaccaagatgcatctcacagaaaaccctcatccacaggtgactcatgtgtcttctagtcagtctggttgtagcattgccagtgactctggaagcagcagtttatctgatatctatcaggctacggagagtgaggtaggagatgtagatttgacacgtcttccagaaggacctgttgattctgaggatgacgaagaggaagatgaagagattgatcgaacagatccattgcaggggcgagatcttgttcgagaatgtcttgaaaaagaacctgcagacaaaactgatgatgacattgaacaattgctggagtttatgcaccagctccctgcatttgcaaacatgaccatgtctgtaaggagagaactctgctcagtgatgatttttgaagtggtagagcaggctggagctattattcttgaagatgggcaagagcttgactcatggtatgttattttaaacggcactgtggaaatcagtcatccagatggaaaagttgaaaatttgtttatgggaaatagttttggaattactcccactctggataagcagtacatgcatggaattgtcaggactaaagtagatgattgtcagtttgtctgcatagcccagcaagattattggagaattttaaaccatgtggaaaaaaatacccataaagttgaggaagagggagaaattgttatggtacatgagcatcgggaactagaccggagtggaaccaggaaaggacacattgtgatcaaggcaacacctgagcgtctcataatgcatttaatagaagaacattccatcgtggatccaacttatatagaagattttctattaacttacaggacatttcttgaaagtcctttggatgttgggatcaaactattggaatggtttaagatcgacagcttaagagataaggtgacacggattgtattattatgggtaaataatcattttaatgattttgaaggtgaccctgctatgactcgatttctagaggaatttgaaaaaaatctggaagatacaaagatgaatggtcatctccggttattgaatattgcctgtgctgcaaaggctaagtggagacaggttgtgctgcaaaaggcttcccgcgagtcccctctacaattcagccttaatggagggagtgagaagggatttggtatttttgttgaaggagtagaacctggtagcaaagctgctgattcaggactgaaacgtggtgatcagattatggaagtaaatggacaaaactttgagaatattacatttatgaaagccgttgaaattttgaggaataatactcatcttgcacttactgtgaagaccaacatttttgtgttcaaagagttactttttaggactgaacaagagaaatctggtgttcctcatattcccaaaattgctgaaaaaaaaagtaatcgccattctatccagcatgtgccaggagatattgaacagacatcacaggagaaaggaagtaagaaagttaaagcaaatactgtttcaggtggaagaaacaaaatcaggaagattttggataaaacacgatttagtatcttgcctccaaagctatttagtgatggaggcctaagccaatcacaagatgacagcattgtgggaacaaggcactgtaggcatagtctggctataatgcccatccctggaacactctcatccagcagccctgatctcctgcagcctaccaccagtatgttggatttttccaatccttcagatatccctgatcaagttataagagttttcaaagtggatcagcaaagttgctacattatcatcagtaaagacaccacagctaaagaagtagtttttcatgctgttcatgaatttggtttgaccggtgcatccgacacatattctctctgtgaagtttctgttactcctgagggtgtcataaaacagagaagacttccagatcagttctccaaattagctgatagaattcaactcaatggaaggtattacttaaaaaataacatggaaacagaaaccttatgttcagatgaagatgctcaagaactagttaaggaaagccagctatccatgctgcagctcagtaccattgaggtggccacccagctgtcaatgagggactttgatttgtttcgtaatattgaaccgactgagtacatcgatgacctttttaagttaaattccaaaacaggaaatactcatttgaagaggtttgaggacattgtaaaccaagagacattctgggttgcctcagaaattttaactgaagcaaatcagctcaaacgaatgaagattattaagcattttattaaaattgcacttcattgtcgagaatgtaagaacttcaattccatgtttgcaataataagtggcttgaacctggcatctgtagcaagactcagaggaacttgggaaaagttaccaagcaaatacgagaaacatcttcaagatctacaagacatttttgatccatctagaaacatggcaaagtatagaaatattcttagtagtcaaagtatgcagcctccaattattccactcttccctgttgtcaagaaagatatgacatttctacatgaaggaaatgactccaaagtagatggtttagtaaactttgagaagttaagaatgatttccaaggaaatccgccaagttgttcgaatgacttctgctaacatggacccagctatgatgtttcgacagaggtcactgagtcaaggaagcacaaattcaaacatgctggatgttcagggaggtgctcacaaaaaaagggcacgccgcagctctctgcttaatgccaagaagctatatgaggatgcccaaatggcaaggaaggtgaagcagtatctttccagtctcgatgtagagacagatgaggagaagttccagatgatgtcattacagtgggagcctgcatatggtaccttgaccaagaatttaagtgagaaaagatcagccaaatcatctgaaatgtctccagtgcctatgaggtcagctggccaaacaactaaagcccacttgcatcaaccccacagagtaagccaggtgcttcaggtgccagctgttaatttgcaccccatcaggaagaagggacaaacaaaagaccctgcactgaatacaagtttacctcagaaagttttaggaacaactgaagaaataagtggtaagaagcatacagaagacactatttctgtggcgtcatctttacattctagtcctcctgcatctcctcaaggctcccctcacaaagttggcagtatcatatctgatcacagcagcaagatcagtggccagagctgccccggaataggtggggcttacttgcaaaagaaaatccttcagattaccaggagcacagccaaaagaacagacagtactgagaaggccactgaggagaatagagacaggacaagttgtgagaacacaaccagaaaaagaatgacatccccgtttagaagacttagggaaagaatgctttcaagggagagactagtcaacagccaaaaagaggacacagatcacaatcaagctacagaaagctgtgagaaagtgaaggatgttggaagcaacatcaaagatgagaaagggagtgccatcttcaattcaaatagccaaggcaacagtaacactttaaactgcttctatacgcgattcaagtctaaaaggaggaagacactc

SEQ ID NO: 244 - protein, 1381 aa, Homo sapiens
MNSPVDPGARQALRKKPPERTPEDLNTIYSYLHGMEILSNLREHQLRLMSARARYERYSGNQVLFCSETIARCWYILLSGSVLVKGSMVLPPCSFGKQFGGKRGCDCLVLEPSEMIVVENAKDNEDSILQREIPARQSRRRFRKINYKGERQTITDDVEVNSYLSLPADLTKMHLTENPHPQVTHVSSSQSGCSIASDSGSSSLSDIYQATESEVGDVDLTRLPEGPVDSEDDEEEDEEIDRTDPLQGRDLVRECLEKEPADKTDDDIEQLLEFMHQLPAFANMTMSVRRELCSVMIFEVVEQAGAIIDGQELDSWYVILNGTVEISHPDGKVENLFMGNSFGITPTLDKQYMHGIVRTKVDDCQFVCIAQQDYWRILNHVEKNTHKVEEEGEIVMVHEHRELDRSGTRKGHIVIKATPERLIMHLIEEHSIVDPTYIEDFLLYTFLESPLDVGIKLLEWFKIDSLRDKVTRIVLLWVNNHFNDFEGDPAMTRFLEEFEKNLEDTKMNGHLRLLNIACAAKAKWRQVVLQKASRESPLQFSLNGGSEKGFGIFVEGVEPGSKAADSGLKRGDQIMEVNGQNFENITFMKAVEILRNNTHLALTVKTNIFVFKELLFRTEQEKSGVPHIPKIAEKKSNRHSIQHVPGDIEQTSQEKGSKKVKANTVSGGRNKIRKILDKTRFSILPPKLFSDGGLSQSQDDSIVGTRHCRHSLAIMPIPGTLSSSSPDLLQPTTSMLDFSNPSDIPDQVIRVFKVDQQSCYIIISKDTTAKEVVFHAVHEFGLTGASDTYSLCEVSVTPEGVIKQRRLPDQFSKLADRIQLNGRYYLKNNMETLCSDEDAQELVKESQLSMLQLSTIEVATQLSMRDFDLFRNIEPTEYIDDLFKLNSKTGNTHLKRFEDIVNQETFWVASEILTEANQLKRMKIIKHFIKIALHCRECKNFNSMFAIISQLASVARLRGTWEKLPSKYEKHLQDLQDIFDPSRNMAKYRNILSSQSMQPPIIPLFPVVKKDMTFLHEGNDSKVDGLVNFEKLRMISKEIRQVVRMTSANMDPAMMFRQRSLSQGSTNSNMLDVQGGAHKKRARRSSLLNAKKLYEDAQMARKVKQYLSSLDVETDEEKFQMMSLQWEPAYGTLTKNLSEKRSAKSSEMSPVPMRSAGQTTKAHLHQPHRVSQVLQVPAVNLHPIRKKGQTKDPALNTSLPQKVLGTTEEISGKKHTEDTISVASSLHSSPPDQGSPHKVGSIISDHSSKISGQSCPGIGGAYLQKKILQITRSTAKRTDSTEKATEENRDRTSCENTTRKRMTSPFRRLRERMLSRERLVNSQKEDTDHNQATESCEKVKDVGSNIKDEKGSAIFNSNSQGNSNTLNCFYTRFKSKRRKTL

SEQ ID NO: 245 - DNA, 7288 bp, Homo sapiens
tgtcatatgactgaggcgcccatgggggtggcggggcggctgtaggagcaggggcctagcaagcgcccagcggagcgacccctgcctggccgtggctagcatggcccctacgctgttccagaagctcttcagcaagaggaccgggctgggcgcgcccggccgcgacgcccgggacccagattgcgggttcagttggcctttaccagagtttgatccaagccagattcgactgattgtatatcaagactgtgaaagacgagggagaaatgttttgtttgactccagtgttaagagaagaaatgaggacatatcagtatcggacttaaatactatttattcttatcttcatggaatggaaatattatcaaatctcagggaacatcagcttagattaatgtctgcaagagcacgctatgagagatacagtggcaatcaggttctcttttgttcagaaacgattgccagatgttggtatatcctactttctggatctgtgcttgtgaaaggctccatggtcttgcctccttgcagttttggtaagcagtttggaggaaaaagaggatgtgattgtcttgtattagagccttcagaaatgattgtggtagagaatgccaaagataatgaagatagtattctacaaagagaaattcctgccagacaatcccgaagaagatttcggaaaattaactataaaggagagcgccaaaccattactgatgatgtggaggttaacagctatctttctcttccagctgatcttaccaagatgcatctcacagaaaaccctcatccacaggtgactcatgtgtcttctagtcagtctggttgtagcattgccagtgactctggaagcagcagtttatctgatatctatcaggctacggagagtgaggtaggagatgtagatttgacacgtcttccagaaggacctgttgattctgaggatgacgaagaggaagatgaagagattgatcgaacagatccattgcaggggcgagatcttgttcgagaatgtcttgaaaaagaacctgcagacaaaactgatgatgacattgaacaattgctggagtttatgcaccagctccctgcatttgcaaacatgaccatgtctgtaaggagagaactctgctcagtgatgatttttgaagtggtagagcaggctggagctattattcttgaagatgggcaagagcttgactcatggtatgttattttaaacggcactgtggaaatcagtcatccagatggaaaagttgaaaatttgtttatgggaaatagttttggaattactcccactctggataagcagtacatgcatggaattgtcaggactaaagtagatgattgtcagtttgtctgcatagcccagcaagattattggagaattttaaaccatgtggaaaaaaatacccataaagttgaggaagagggagaaattgttatggtacatgagcatcgggaactagaccggagtggaaccaggaaaggacacattgtgatcaaggcaacacctgagcgtctcataatgcatttaatagaagaacattccatcgtggatccaacttatatagaagattttctattaacttacaggacatttcttgaaagtcctttggatgttgggatcaaactattggaatggtttaagatcgacagcttaagagataaggtgacacggattgtattattatgggtaaataatcattttaatgattttgaaggtgaccctgctatgactcgatttctagaggaatttgaaaaaaatctggaagatacaaagatgaatggtcatctccggttattgaatattgcctgtgctgcaaaggctaagtggagacaggttgtgctgcaaaaggcttcccgcgagtcccctctacaattcagccttaatggagggagtgagaagggatttggtatttttgttgaaggagtagaacctggtagcaaagctgctgattcaggactgaaacgtggtgatcagattatggaagtaaatggacaaaactttgagaatattacatttatgaaagccgttgaaattttgaggaataatactcatcttgcacttactgtgaagaccaacatttttgtgttcaaagagttactttttaggactgaacaagagaaatctggtgttcctcatattcccaaaattgctgaaaaaaaaagtaatcgccattctatccagcatgtgccaggagatattgaacagacatcacaggagaaaggaagtaagaaagttaaagcaaatactgtttcaggtggaagaaacaaaatcaggaagattttggataaaacacgatttagtatcttgcctccaaagctatttagtgatggaggcctaagccaatcacaagatgacagcattgtgggaacaaggcactgtaggcatagtctggctataatgcccatccctggaacactctcatccagcagccctgatctcctgcagcctaccaccagtatgttggatttttccaatccttcagatatccctgatcaagttataagagttttcaaagtggatcagcaaagttgctacattatcatcagtaaagacaccacagctaaagaagtagtttttcatgctgttcatgaatttggtttgaccggtgcatccgacacatattctctctgtgaagtttctgttactcctgagggtgtcataaaacagagaagacttccagatcagttctccaaattagctgatagaattcaactcaatggaaggtattacttaaaaaataacatggaaacagaaaccttatgttcagatgaagatgctcaagaactagttaaggaaagccagctatccatgctgcagctcagtaccattgaggtggccacccagctgtcaatgagggactttgatttgtttcgtaatattgaaccgactgagtacatcgatgacctttttaagttaaattccaaaacaggaaatactcatttgaagaggtttgaggacattgtaaaccaagagacattctgggttgcctcagaaattttaactgaagcaaatcagctcaaacgaatgaagattattaagcattttattaaaattgcacttcattgtcgagaatgtaagaacttcaattccatgtttgcaataataagtggcttgaacctggcatctgtagcaagactcagaggaacttgggaaaagttaccaagcaaatacgagaaacatcttcaagatctacaagacatttttgatccatctagaaacatggcaaagtatagaaatattcttagtagtcaaagtatgcagcctccaattattccactcttccctgttgtcaagaaagatatgacatttctacatgaaggaaatgactccaaagtagatggtttagtaaactttgagaagttaagaatgatttccaaggaaatccgccaagttgttcgaatgacttctgctaacatggacccagctatgatgtttcgacagaggtcactgagtcaaggaagcacaaattcaaacatgctggatgttcagggaggtgctcacaaaaaaagggcacgccgcagctctctgcttaatgccaagaagctatatgaggatgcccaaatggcaaggaaggtgaagcagtatctttccagtctcgatgtagagacagatgaggagaagttccagatgatgtcattacagtgggagcctgcatatggtaccttgaccaagaatttaagtgagaaaagatcagccaaatcatctgaaatgtctccagtgcctatgaggtcagctggccaaacaactaaagcccacttgcatcaaccccacagagtaagccaggtgcttcaggtgccagctgttaatttgcaccccatcaggaagaagggacaaacaaaagaccctgcactgaatacaagtttacctcagaaagttttaggaacaactgaagaaataagtggtaagaagcatacagaagacactatttctgtggcgtcatctttacattctagtcctcctgcatctcctcaaggctcccctcacaaaggttacacacttattccatcagctaaatctgacaacttgtctgactccagccatagtgagatttcttcacggtccagcatcgtgagcaattgttctgttgactccatgtctgcagctctacaggatgaacggtgttcctctcaggccctggcagtccctgaatccactggggcattggaaaagacagagcacgcttcagggataggagatcatagtcaacatggccctgggtggacactcttgaagccatctctaatcaagtgtttagctgtctcatcgtctgtgagcaatgaagagatttctcaagagcatatcattatagaagcagctgacagtggtcgtggaagttggacttcgtgttcaagcagctcccatgacaacttccaaagccttccaaacccaaaaagctgggattttttgaactcttacagacatacccatttggatgaccccattgctgaagttgaacccactgactctgagccctattcctgttctaaaagctgctctagaacttgtgggcagtgtaaaggaagcctagagagaaagagttggacctcctccagttctctgtctgacacgtatgaaccaaactatgggacagttaaacggagagtattggagagcaccccagctgagtcatctgaaggcttggaccccaaggatgccactgacccagtttataaaactgtcacttcaagtacagaaaagggcttgattgtgtactgtgtcacctcacccaagaaggacgataggtatagggagccacctcccactcctccaggatatttggggatttctttagcggacctaaaggaaggaccccacacacacctaaaacctccagattatagtgtggcagtgcagaggtcaaagatgatgcataacagcctctctagactgccaccagcttctctcagtagcaacctcgtggcctgtgttccatcgaagattgtaactcagcctcagaggcataatttgcagccattccatcctaaactaggagatgtgactgatgcagatagcgaagcagatgaaaatgaacaagtttcagcagtctagcctttggatgacctatttgaaaaccactgaaagtcgtggaggaatgggcaagaaccacctcatgattctgcaggccattgctaacgaacagctcattgctacaaccagtccagaggttttattccctctactccgagcaatgaaatagacctgagttatgcttcctttcatttaatttctgcagataaatagtttcctgagcaatggatgctatgcctggataccagtctccactttgcacgccggaactgccttgggaccacagttacagaaaaaatgtaaactcagagtgatccttgtgtatattgctatagatttttctttaacaagctattttaaagataatggcattattatttccaagccatagcttgggctgaaggacaaattgaaattgtctgccaataccaaggatattcttgtatatttgaaaaataacttattatttgaattgttgtggttttgtttgtatttgagagctcttgttagctgatattcatgtttgaggtcataaaattgtctctggtctgaccaaacagaagtcatctttacagaggtgatatgcttgatctacacagagatgtgacttgatctgtagcaccaatgcaatgtaggtctcagtttgagagaaataggaagccctttgcagttgaggtgttaggaacctgctggtcatggtgtggaaggccaaatgaagctgccacagggtttcttgtcagtcctttgggaaatgggagggagtagtttggggaggagggtgggaaccctaatttccacagaatgaaattttgatgttaaatgacatgtatacaaattcttccttaagtgaaagttatgctgcatcgaattgtaactgaaagtatagatccaacaaatagagactgggttctagagagttctggtctatagaaacccaaaactaaaatctctcataactcaagtatggaatactttttttaaagaaattcttatcatgggtgttgtaataatgaagacgaatttgactttatgcagtgttctgcagcatgcctcccccacatctcatagcaccaggttgtgtctgacctgacataccctgcagctctcagctggctgcagtaacattttgtgggagaaagaggagctggagttacagaaatgattgtctcttggttctcagtttttagcccttgagaggacatacttttccagcctcatgggtatggcactcttaattaaaatttcagtgactgtttactggatgaggcagatttttcacatttttgcaaattaaatatattttatatatattaagtttaattttttcagtttttttaatgtaaaagcaagtgaaattttaataaacttctgtaattaccaaaaaaaaaaaaaaaaaaaaagccaaagccattaacgtgcactacccagatcaacttggagccaaaaggggtttacttctgaatggctgtccgtatgtgtccacataggatttagttggtttgtggcctcctttatagaaatgtgttgtctttccctagctgtctctgctgtctgtcttcctgcatatcccccttcattttaaaatcatgaatcagttgtaagtggtaaatggtagtagttcatctttcccatcaacatgattgtctctttattttaggaataatagcatttcaaaaattcctgtggtaaagaaacattaatctgaaacttaagccttagaaattaatcgcaggtatgatagaatgaggcttggtggttccatagctttcttggtcctttgaaatgggaaataacctgaaccaaaaatcctagtttgaaagttacacttcagtgatttggcctataaacagtggtcctatgattatacattttttccttcactgatttgcataattttgttttcatggccacagcaaaacaatgtgaaatatatttttgctatacccactttttttatcaaattcagatgtctactctcaccattttatattcatttccccagaaaaatgtgctgttttcataatgtctttatttagcaggtctttcaaaccaaatggaagccttacctgtctttgtccttaatagtgtaaatatcttgcacagagtgttgaggcctatggttttggacttgcaccttacagctgcctttgttttatctatctagctttaactgtgagtgttcagatcagctgatcacattgatcaggagccaaagccaaatgctttgtagtttgttatgtatgtatcccttaa

SEQ ID NO: 246 - protein, 1639 aa, Homo sapiens
MAPTLFQKLFSKRTGLGAPGRDARDPDCGFSWPLPEFDPSQIRLIVYQDCERRGRNVLFDSSVKRRNEDISVSDLNTIYSYLHGMEILSNLREHQLRLMSARARYERYSGNQVLFCSETIARCWYILLSGSVLVKGSMVLPPCSFGKQFGGKRGCDCLVLEPSEMIVVENAKDNEDSILQREIPARQSRRRFRKINYKGERQTITDDVEVNSYLSLPADLTKMHLTENPHPQVTHVSSSQSGCSIASDSGSSSLSDIYQATESEVGDVDLTRLPEGPVDSEDDEEEDEEIDRTDPLQGRDLVRECLEKEPADKTDDDIEQLLEFMHQLPAFANMTMSVRRELCSVMIFEVVEQAGAIIDGQELDSWYVILNGTVEISHPDGKVENLFMGNSFGITPTLDKQYMHGIVRTKVDDCQFVCIAQQDYWRILNHVEKNTHKVEEEGEIVMVHEHRELDRSGTRKGHIVIKATPERLIMHLIEEHSIVDPTYIEDFLLYTFLESPLDVGIKLLEWFKIDSLRDKVTRIVLLWVNNHFNDFEGDPAMTRFLEEFEKNLEDTKMNGHLRLLNIACAAKAKWRQVVLQKASRESPLQFSLNGGSEKGFGIFVEGVEPGSKAADSGLKRGDQIMEVNGQNFENITFMKAVEILRNNTHLALTVKTNIFVFKELLFRTEQEKSGVPHIPKIAEKKSNRHSIQHVPGDIEQTSQEKGSKKVKANTVSGGRNKIRKILDKTRFSILPPKLFSDGGLSQSQDDSIVGTRHCRHSLAIMPIPGTLSSSSPDLLQPTTSMLDFSNPSDIPDQVIRVFKVDQQSCYIIISKDTTAKEVVFHAVHEFGLTGASDTYSLCEVSVTPEGVIKQRRLPDQFSKLADRIQLNGRYYLKNNMETLCSDEDAQELVKESQLSMLQLSTIEVATQLSMRDFDLFRNIEPTEYIDDLFKLNSKTGNTHLKRFEDIVNQETFWVASEILTEANQLKRMKIIKHFIKIALHCRECKNFNSMFAIISQLASVARLRGTWEKLPSKYEKHLQDLQDIFDPSRNMAKYRNILSSQSMQPPIIPLFPVVKKDMTFLHEGNDSKVDGLVNFEKLRMISKEIRQVVRMTSANMDPAMMFRQRSLSQGSTNSNMLDVQGGAHKKRARRSSLLNAKKLYEDAQMARKVKQYLSSLDVETDEEKFQMMSLQWEPAYGTLTKNLSEKRSAKSSEMSPVPMRSAGQTTKAHLHQPHRVSQVLQVPAVNLHPIRKKGQTKDPALNTSLPQKVLGTTEEISGKKHTEDTISVASSLHSSPPDQGSPHKGYTLIPSAKSDNLSDSSHSEISSRSSIVSNCSVDSMSAALQDERCSSQAVPESTGALEKTEHASGIGDHSQHGPGWTLLKPSLIKCLAVSSSVSNEEISQEHIIIEAADSGRGSWTSCSSSSHDNFQSLPNPKSWDFLNSYRHTHLDDPIAEVEPTDSEPYSCSKSCSRTCGQCKGSLERKSWTSSSSLSDTYEPNYGTVKRRVLESTPAESSEGLDPKDATDPVYKTVTSSTEKGLIVYCVTSPKKDDRYREPPPTPPGYLGISLADLKEGPHTHLKPPDYSVAVQRSKMMHNSLSRLPPASLSSNLVACVPSKIVTQPQRHNLQPFHPKLGDVTDADSEADENEQVSAV

SEQ ID NO: 247 - DNA, 5809 bp, Homo sapiens
aataacacagttattaatggactgcttggaaatatagttcacagcaacccaatggacatgcctggaagagagctcaatgaggacagagacagtggcatagcacggtctgcatctctcagcagcttgctgatcactccatttccttccccaaactcctcacttacccgaagttgtgccagcagctaccagcgacgttggcgacgcagccaaacaacaagtttggaaaatggggtatttcctagatggtctatagaagaaagctttaatctctcagatgaaagctgtggccctaacccaggaattgtgcggaaaaagaagattgcaattggggtaatcttttcattgtccaaagatgaagatgaaaataacaaatttaatgaattctttttttcacattttcctctctttgaaagccacatgaacaaattaaagagtgcaatagaacaggctatgaaaatgagccggagatcagctgatgccagtcagagaagtttggcatataatcgaatagttgatgccctaaatgaattcagaacaacaatttgtaatctttacacgatgccacgaattggagaacctgtctggcttacaatgatgtcggggactccagaaaagaaccacctttgctatcgtttcatgaaggagttcacctttctaatggaaaatgcttccaaaaatcaattcttgccagctctcattactgcagttctgaccaatcatcttgcctgggttccaacagtcatgccaaatggacaaccacctataaaaatatttttagaaaagcattcctctcagagtgtggacatgttggcaaagactcatccatataacccactttgggcacaactgggagacttgtatggcgctattggctctcccgtacggttagcaaggactgtggtagttggcaaacgacaagacatggtccagaggctactttattttcttacttattttataagatgctctgaacttcaagaaacgcatcttttagaaaatggagaagatgaagccatcgttatgccaggcacagtaattactaccactttagagaaaggtgaaatagaagaatcagagtatgtccttgtcacaatgcatagaaacaaaagcagtttgctctttaaagagtcagaagaaattagaactcccaattgtaactgtaaatattgcagtcatccactccttgggcaaaatgtagagaacatttcacaacaagagagagaagatattcaaaacagctctaaggagctgctaggaatttcagatgagtgccggatgatttctccttctgactgccaagaagaaaatgctgttgatgttaaacagtacagagataaattaagaacttgctttgacgccaagttagagacagttgtttgcacaggatctgttccagtagacaaatgtgcattgtcagagtcaggcttagagtcaacagaggaaacatggcagagtgagaagttgctggattcagacagtcacacaggcaaagcaatgagatccacaggaatggttgtggaaaaaaaacctccagataagattgtgcctgcttcattttcttgtgaggctgcccagacaaaggttactttcctgattggggattctatgtcacctgattcagatactgagcttcgaagtcaggcagtggtggatcagattaccagacatcacaccaaaccattgaaggaagaaagaggggctattgatcagcatcaagaaactaaacaaacaaccaaggaccaatctggagagtctgatacacagaacatggtttctgaagagccctgtgaacttccctgttggaatcattcagacccagaaagcatgagcttattcgacgaatattttaatgatgattcaatcgaaaccaggactattgatgatgttccatttaaaacaagtacagatagtaaagaccattgctgtatgttagagttttcaaaaatattgtgtacaaaaaataacaagcagaacaatgaattttgtaaatgtatagaaacagttccccaagattcatgtaaaacctgctttcctcagcaggaccaaagagatacactctccattcttgtcccccatggggataaagagagttcagataaaaaaattgctgtaggaactgaatgggacattccaagaaatgaaagttcagacagtgcccttggggatagtgaaagtgaagatacaggtcatgatatgactagacaagttagcagttattatggaggagagcaagaagattgggcagaagaggatgagataccttttcctgggtcaaagttaatcgaagtgagtgctgttcagcccaacattgccaacttcgggaggtccttgctgggtggctactgctcatcttatgtgcctgactttgttcttcaaggaattgggagtgatgagaggttccgtcagtgtctgatgtcagatttatctcatgctgtgcagcatccagttttggatgaaccaatagcagaagctgtctgtattatagctgacatggataaatggactgttcaagtggccagtagccagagacgagtgacagataataaattgggaaaggaagtattggtttccagtcttgtttccaatctgcttcattccacacttcagctttataagcataacttgtctccaaatttttgtgtaatgcatcttgaagaccggttgcaggagctatacttcaaaagtaaaatgctgtctgaatacctgagggggcagatgcgtgttcatgtcaaggagctgggagtggttctggggattgaatccagtgatcttccacttctggctgctgtagcaagcactcactctccatatgttgcacaaatactcctttaatatacctaaaaattgttagaaattggtgggaaaataggtagaaaccaaggaagcagacacaacatgcatttatggagattctttttcccttttagacttccatctgaatgagtcagtcaccagggtattctgcatagcattgtatattctgtgtatgtcagatggctttttctttttgactggacttttgggtggtggtagatttttaaacaaatgaaattaaagcaacaataattttgaagcatttgaaaaagccaaagtgtacggtagaaatttctacaaaatgaatattatcaagagtttcatgtgatcactgcagtgttgtcacagctcataaatagcaacagtgtctcatgatttaatggctcagaaatagttattcattagtttttaatttttaatttctaaggtacagagatctataaaaccttgattatttgttagttttgcaattcaaaacagctaatgtctggttatttctcaaagtaagtattttaaacagcctgttaattataagaaactcagaataatgagtgtaaatgtgttatgttatccacccaagtgtacatatgtacctatttttttttaaaaagcagaaatagaaatacaagactggtaaacatgcctttaaaaatatatatattttcaactagtattgtctataatgctgaaatattacttattggtgatttttctgtttcacacactctaaaatataagtaaagccaaccttttttttaaggctgagattcccaaaatgagaatactactttataccatttgtttataagtatgaactgttcttataaatattaatatttacatattcactaatttaacataaatgaaaattaggattaaaaattgcaccaaagcatcggcaaaaacaatactatattctttaaaagtgctcaggtagccaaggcccttgcttttggtatcaaccctcatgaacccataggagctgaatatttgtttcactgcttaataatcctcaatttacactattcataactcttaaaattattctctttttttctaagagcccctcccttccaaaagtgtatttttttcaaagattttcacttctcaattgttgcctttgtacatactatagagtgttgcttgtaagaaaggctaatatggaaccaaactcttgtaagtaatgtaaatagaaaggtgggtggataaagttttcaatactttctactacctcagtttacttgagtactacattatagtttattctttgcttatctggtctaagagacttttaatgctagtagtaaagttggtttctgctttcattgactattttcatcataatttcatcattgattaaaaaaagaaaaccacttgtttattcagttattaaatatatttactatataacacatccattcttgctgtttaaattttcaatagttaatggaaagttgtctttgaccttgaatttacagcattgggtcacattttgccttgctgtgtatgtattcaagagacttccaactagacaaagaaaaaattgttgttttaatggaatgtaaacctgaaattggtgtgtctgcaatctgtttggcccatgaccttttacctagtcccagttattacctgagtctcccatggatgacttgctgccaaggagtgtttgtggatatattttctttggcttaattttcttattctgtgcattaacaaaattatccagttgtctgattttggaattctatgagtcaatctttttggcagaattcagaatattaaaaagttcatacatttgcgggccattgtacctttttttttttttttttttttttgacggagtttcactcttgttacccaggctggagtgcaatggtgcgatctcagctcactgcaacctccgcctcccagttcaagtgattctcctgcctcagcccccaagtagctgggattacaagtgtgcgccaccacacccagctaattttttatttttagtagagatgagatttcaccatgtgttggtcaggctggtcttgaactcctgaactcaagtgatccacctgcctcgacctcccaaagtactgggattacaggcgtgagccactgtgcccagccttgtacttttttttttttttattgtagctctgtatagcacttggataatgtctgggtgtctccttaaccatcaaactgttctttatttaaaatgtttaattaccgtttagaaattctagtcctcaataagtgggtggctcatgctattgttgttcctaaagctaagctttgctgggaaggaaatgacctatagtttcttaaagaatcattaatccttataggattcctgagttactgttttgttcctccccactgcttcccattcctgagttttgtaattcctaatccttctataatttctattaccttcaccatagtcattctttccttacgcaaagcccaaggaatgagctgctgctactttaaagtgtggtcattatgatgaatgtgaaaagagttttggcttgttctaaataatttttacaagttatggtacagacagttgttacatatcaaaaaaaacctgtttattgaaacaggaaataaaaaagggatcttttacattatagaattaaaactaattttttcttgtatataaactaattggtttgattttaaatatttctggcttttattaatatgtcttaattttgagtttgaaaatgttaagtgcaataaaaacatactagtacagattttgttttgttccaattggcatactctggggatgatcacttaaaaaaacagattttacataatgcctacttctggtagatgtcttatgagattgttctgctttttctaagttacttagatgttggatatgtacatagctgtttcttgttctgtatacatttctcaaatgtacacttgtattataataacctcccagttctaggggatatttgtgcaataaatacacatgtcaacttgatggatg

SEQ ID NO: 248 - protein, 926 aa, Homo sapiens
MDMPGRELNEDRDSGIARSASLSSLLITPFPSPNSSLTRSCASSYQRRWRRSQTTSLENGVFPRWSIEESFNLSDESCGPNPGIVRKKKIAIGVIFSLSKDEDENNKFNEFFFSHFPLFESHMNKLKSAIEQAMKMSRRSADASQRSLAYNRIVDALNEFRTTICNLYTMPRIGEPVWLTMMSGTPEKNHLCYRFMKEFTFLMENASKNQFLPALITAVLTNHLAWVPTVMPNGQPPIKIFLEKHSSQSVDMLAKTHPYNPLWAQLGDLYGAIGSPVRLARTVVVGKRQDMVQRLLYFLTYFIRCSELQETHLLENGEDEAIVMPGTVITTTLEKGEIEESEYVLVTMHRNKSSLLFKESEEIRTPNCNCKYCSHPLLGQNVENISQQEREDIQNSSKELLGISDECRMISPSDCQEENAVDVKQYRDKLRTCFDAKLETVVCTGSVPVDKCALSESGLESTEETWQSEKLLDSDSHTGKAMRSTGMVVEKKPPDKIVPASFSCEAAQTKVTFLIGDSMSPDSDTELRSQAVVDQITRHHTKPLKEERGAIDQHQETKQTTKDQSGESDTQNMVSEEPCELPCWNHSDPESMSLFDEYFNDDSIETRTIDDVPFKTSTDSKDHCCMLEFSKILCTKNNKQNNEFCKCIETVPQDSCKTCFPQQDQRDTLSILVPHGDKESSDKKIAVGTEWDIPRNESSDSALGDSESEDTGHDMTRQVSSYYGGEQEDWAEEDEIPFPGSKLIEVSAVQPNIANFGRSLLGGYCSSYVPDFVLQGIGSDERFRQCLMSDLSHAVQHPVLDEPIAEAVCIIADMDKWTVQVASSQRRVTDNKLGKEVLVSSLVSNLLHSTLQLYKHNLSPNFCVMHLEDRLQELYFKSKMLSEYLRGQMRVHVKELGVVLGIESSDLPLLAAVASTHSPYVAQILL

SEQ ID NO: 249 - DNA, 391811 bp, Homo sapiens; identical to SEQ ID NO: 234

SEQ ID NO: 250 - DNA, 6257 bp, Homo sapiens; identical to SEQ ID NO: 235

SEQ ID NO: 251 - protein, 1499 aa, Homo sapiens; identical to SEQ ID NO: 236

SEQ ID NO: 252 - DNA, 4447 bp, Homo sapiens; identical to SEQ ID NO: 237

SEQ ID NO: 253 - protein, 1439 aa, Homo sapiens; identical to SEQ ID NO: 238

SEQ ID NO: 254 - DNA, 1624 bp, Homo sapiens; identical to SEQ ID NO: 239

SEQ ID NO: 255 - protein, 508 aa, Homo sapiens; identical to SEQ ID NO: 240

SEQ ID NO: 256 - DNA, 6527 bp, Homo sapiens; identical to SEQ ID NO: 241

SEQ ID NO: 257 - protein, 1589 aa, Homo sapiens; identical to SEQ ID NO: 242

SEQ ID NO: 258 - DNA, 4380 bp, Homo sapiens; identical to SEQ ID NO: 243

SEQ ID NO: 259 - protein, 1381 aa, Homo sapiens; identical to SEQ ID NO: 244

SEQ ID NO: 260 - DNA, 7288 bp, Homo sapiens; identical to SEQ ID NO: 245

SEQ ID NO: 261 - protein, 1639 aa, Homo sapiens; identical to SEQ ID NO: 246

SEQ ID NO: 262 - DNA, 5809 bp, Homo sapiens; identical to SEQ ID NO: 247

SEQ ID NO: 263 - protein, 926 aa, Homo sapiens; identical to SEQ ID NO: 248

SEQ ID NO: 264 - DNA, 134022 bp, Mus musculus
  misc_feature (1)...(134022): n = A,T,C or G
tgaaaacactcagaaatataaaataaatctttaaaaaagaatagtaaaaatttttttaaaaatcagtaacatttttagctttcctggcataattatacactgtcaattataagatataccctttggatattaacccaaaggaagtgattttacgaaaaatttgtcatgctatttctgtacaagtgtactacaaatagcttaactttctgtggacatttatacctttttctatatctttaatatgtcatctaccgaagaaatttcccagaatacttaatagttgtttttttttttttaacaaagtccatcaggtcagcatgaccggaatagttcgtgtctatgaatggagcccagaaccatctattaatatcaacgtaaacagaccaaggaggcttgaagggcgtgacactatgtcctatatcagaattcctgactcatcctgaaaaactacagtatttactgagttgtcatagtgtcttgtccaaggcacagagtgtaaaggaaagacacagaccttgtatgggcttacttggtcacgacatgaagttgtaccagtaaactataataaaatggctcaacaggctaccatttcccccctcctgttaaagaaggtacattttagagctcatatcaaaagctacccaacggggctggagtaatggctcaatggttaagagtcctggatgatcttgtaaaggactcaggttcagtttcccagatccacatggtggttcataagcatctattttgggaaagagtaaaagcaacctcatgaagggatggtaaactagggtttggggccaatccattttagtgtccttcgtacagagaagctatgcacagtacctggaagacttaagacatcctcgccaagggccatgcttcatttccttccttactctgtctctcgaaagtatagaccttagtcaaagtcttagtattaatagtttaaaaggcaggatataatacattgattataacacatcaatatatatttcttttggtcctttagataaaaagatgtcagctttgtcgtggtgtgtgtgtgtgttcatactcattctgatacattggctagttagcaaatctcaggggttgtcttgtctctccttctccagcactgtgactataagcatgcactgtcattcttggccttttaatgtgtgctttgctgacaaaatacatttgacatctgaaaagggagccaccatgaatcttccttcttttatagttaaaagaagatgaagtaccagtgagaggctgtgggagcctccccactgaaagacgtacagggtgggaggtttagagggtttgggtgaacagcacgtcactccttttcaattgtcccatagagtacaaatcagtgactggttaagtgtcggatcaatttagatgttgcaaaggagcaccaaatgtatatgtcatgggaaccccagatttagatattactttttattaaaaaacaaagctgggggttattcacatttttctgaagttagagcagggcttagattctggtaggaaattaataactgtttattgtgtgatactatttcctatggaaaagtaaacaaacattgggctcacttacatagggagccacggacagaactacaataagaatatcaccaaagtccaagttggtaaaccaaatgagttttatttgagttattcacaggagtatgtctgagggtttttttgtttttgttttttgttttttttttgtttgttttgttttttgttttttttgagacagggtttctctgtatagccctggctgtcctggaactcactttgtagaccaggctgacctcgaactcagaaatccgcctgcctctgcctcccgagtgctgggattaaaggcgtgtgtcaccaccgcccggctgaggtgttgtttttaagagtagaaatgactcaaagacagtggaaccactgaaagtccacctcaacatggaaaatagaaacctggagcttatttcacacttttggaagcttgacaggttggacagtatgtctcccaggcagcttggccactctgagaatctcccagctttctttaacactaatatttgcctggggaaggagggtactggtgagtttgatcagtttcagggacttcctggaacttttgagttgtttgcttcctaaacttaaggagcttccctgaaggttgggatgtttcacttctctttagtattctaaagtgttaataagcttctctaaaagactgaatggttcacatcctccccttcactcccctccccccactcaacttgtagaatatcttacatcttaacaagcttccttccaagatggaatgttttatcttgaaggagcctgctatctaccagtactgtatcagagagaaaattatgcagatatatacattaatatatacagtgtatgaccttgttggaggaagtgtgtcactgtgggggtgggcttttaggttctatgcttaagctctgcccagaatggaagagagtcttctgactcccttcagatcaagatgtacaactctctctctgctcctccaggaccacgtctgcctgcatgtcatgcttcccaccatgataataatggattgaacttttgaaactataagccagccccaattaaatgggtcctatataagagttgcttcagtcatggtgtctgttcacagcaatggaaaccctaactaagacatacatgtgtctaatatatatgtacatgtgtgtagcaggaacacataggaacacctgtttctatgtaaacgccagggggtcatgcagctacaaaagcatctcctgcagaaggacctaatcaaggattgcctgagagagcaaggactgctggtacaaacaatgccagccaatcaggaactgcggtttagaagagatgctttcttgggaccaatgggggcatgggtgggcggtattaaaggagctttcagccgtgctcaggggagcttgctactgtgtttctcacctgctcccggagtctgtgtcactgactctgtgccaactcacctccaacccccaagagcaggtagggtgagatggagagatatccagggcacaggcaacacgtgtgtgcatgtatttccatatgaaaagagagatatagcaggcgttaagtagaggaaatggaacaaacatactgcagaagtttttatccccatttcttctcttgaacagaattagaaatctctgtggggcctgtgttagtttttaattaatttggagtattttctatttcccgacacgttaacattccacacaaatggtgccctgaaatgtttgtaggtttcatggcagagtagaatagtttccacttgtaccttcctagaaacgataactactcgttcactagctcaggataacattcctatccaggactctgatttgggagtaaaggttaaaatcatattatattggagctttacatgacttctgagttgctagggaacatccaatattcatatcacacacacacatacacacacacacacacacacacacacatgcacacacgcgcacacacacttcaattgagaatgcagtcagatgaggactgagtcagcatctttcaagcacagccagttatgaaggaaagctcactcacagaaatttgaaactagagtcattattggagtcttaaaatatttaaattaaatatcataattaattttcttctaacaaatccctatgcaagcattactttagcttttaacaggatggccaatttaagctaatagatagtgatctattatctagctagtaaactcatgtgcacatcggatgaacaagtacaagctgagtctatattgtctccacggcaacctggaaggacccaatggacatgtgaccatttgcagctgagcttagagtcaaaggttaaagagagtcaagcgaggatgtcttcccaaaggactgggttagcagtgtgagttggcagagatggttcggtgtttaagagcacttcagtagtcttgcagaggacatggctttactccccagcccctacaatgggtggctcacaatagtttgtaccttcagctccagaggctccaatgccctctcctggcttccctgattctctgcgcacatatggtgcacataagctcacgcacgcacacacctacatagacatatgtaaacaaagagtaaatctttaaaaaggtaagatttgtatgcaagtacgattactgtgagatattagtaagggtaccttcctttcaccagatagacgccttgcaagagctaaaatggagttaaaactgaatggtggggattcttttaaaatatcaaggacatccttataggagagatgacttcagatggagggcagaacacggaaaatgaacaccaaaatggagaccaggataagccagagccatagactgaactctgaagagctagtgatatgtaaattcatgtcctaataagaatattatagctggagagatggctcgacagttaagagcaccacctgctcttctgaaggtcctgagttcaaatctcacaaccacatagtggctcacaaccatccgtaatgagatttggcgccctcttcttgtgtgtctgaagacagctacagtgttcttacatataataaataaattaattaatttttgctgggcagtggtggtgcacgcctttaatcccagcacttgggaggcagagacaggcggatttctgagttcgaggccagcctggtctacaaagtgagttcacaaagtgagttccaggacagccagggctatacagagaaaccctgtcttgaaaaacaaaaaaacaaaacaaaacaaaaaaaagaatattatattaatcagtctgccaagcatgagataaggctaagcaggtacacctgtgccaaaatggggaggacactgccagcaaaggtgagccaagtttaatcattcagtaggatgttttaagtaaaaaaaaaaatatatatatatatatatataattacaaggggaaggagagatagctcaatggttaagaaggctgctcttccaaaagacccaagttctgcttttggtattcacgttagttggctcacaatcacttgtaactccagtttctggggaccagacaccatcttcgggccttcacaggtacccatattggtggatacttacccacacatagacaaacacagatgcacaaaaatttgtaaaaagccttaaaaaattctgtccagagtcaagcgaccatctaaatgagttcccctcgggcttctccctatcacacttcacctttgatccctctctactcacagctttaatgtcaccactgtcctctcccttgctcctgatatctaccagacacttctgctaaagtggaactgctcagatccggactgctccctgggaggtcagtttgcaaaatgtcataggagcgtttcttgtctcgtctcttaagatgtgtcgttaggatggctattccctgtcttgccaaacaagagatcaggaacccttctagttgccaaatagaaagacgtttagctaattaaaaaaaaatgttgttctgaaatctttagtggcttcagcagacaggtgagctgggttgggagccatgaaaagctgaaagtgacagaggctgaccctccatgatttacagtgggaaccaaagaatcacataaaggtgaaaggatctgcttcagcagacacaactcatgtctacggccaggattagaatctaaatctctcacatccaaataactgcatcttaccaaaactcattggttttagttaacttacagggagaactgaaatcacatgctatgcaaccacattccccatactcgacacaggcatttgaaccagatagctctttgctgagggtgggacttcctgtgtattgtggcatgctgattgcattcctttgtcctgtctagtatatgccagcctctcccaatcttccatattacaataaggcaggcattgccaaacctccccaggaggcaaaactgacaaacagctcttgacactaagtgatagcaggtaccttccttgacctccggattattcctgacacttatgctacctcctccctcaccaacctgtaacttcataataacagcttcagaaaccagtatgacctaacccaagggcctccttccaagaatgtcacactctcagtctgacagaatgggtgttttcccaggtgttctgggttcccctgaggtgttagctctattgttggaatctagttattccaggctcgccaaggttacaggtccttaccccctctacttcatgtcggactgcagaaggtcttggagcgcaagatgtgctaagtgctgtgctgggcactgagaattaggggcattggacaaatctctgatctctaggatcagagccacctgcggagacacacagataaaggaacacttgtcagccctgagatgagtcttgggtaagacccacaggtgaggtattacagaattagaaagtgcacccagttcatagagagggtgctgggagggacagcctcgatacgcagagcatagtgagaatagtcaaggacaaatcagaaccatcagctaatgaaagagtctttcgggtagagggtcaagtacatacaaaagagccagaaatcctgccttctcccgggtacggtatcagcctggggtgagaaatgacccaggaagttctgtagggctcaggcatggaacagccaatggcgcgctatatcaagaagttggggtactggctctgaatataagtagaacttgtcagatttgcgttttagaaggatctgaagtcgggaaaataacaagataaaccttcggtgaacctgtgaagaaatcaccggaatttttctcttgctttcgcacactacctcaatccagcagagcaagggaacaatttcttgaccgtgcatggagggaagggaggagaaagacttctttcccaccaagggaagaacctcttttctaaaccttttcagggagcttgaattccctgtccttccagcagcccgctcagaactcaggatctctaagacaaacggcccactctgtcatttcgcagtctatggttcggctggcttagggtaaaagggtgctttgtgtacgtgcgtgcgtctgcagatgctcagcgcctgttgcccctcacgttgtctccgtggagagtgagtggcagattgatttgcagaatgcgctccatttacgggctgtagcgactgtgcgctcattcagacaaagaacatgccaaatcgcagcagcagcagggatgcgccacaccagctgagattagaagtcttctagggtggctgagatggttcagctggtaaaggcaattagcatcaagtctgctgaccggagtttgattcccaggacccacaacggtggaaggagagaacgatttcctgctaagttgtctctcccgtgaccttcacatatgctccatgttaggcatgtatacaaatgtgtgtgagtgtgtgcaggcacacgtctgcgcactgaataattgtatgcacactaaataactgtaacaaaagaatggaactctctttacaaataggagcaggctcattaaagagctagctacggcagttgctgacaatacaaatggacaggcagctctaggtggttgctcaggctaagccagtctgcatgaagctgtctcaggacctgtaggaaaactggtgttcctgtcattgttccagaaggaagatgggggtgtgttgaaatggatcactacacatgtatgtggtggttcagtgagactttaaaggcccacgaaggaggaggctctaagcctgcttatatgcagaaggaaggtgggaaggtatagcagggagtagacctgacagagaaggcaaaagaaagtccttacaagtggacacatggaacagaaagctcttctctcacaggcagatgctgccccctctgtatgtgaagtcgccttgattaattttcctgaacatcagtaaaggaagccaggaattgtgggaaatgcctataacccccagcacttcaggggcacagaggcaggagaatcactgtaaattctacactgagttgtaagccagccagccaaggcatgatctcaagaattaaaaaaacaacaacaacaacaacgaacgacgacgacgacgacaacaacaacaacaaaagaatgtcagtaaaggtcagagggtgtaacttatgccttcctcccccaattgaatgcatttttattttaagagctgatttgctaacttgtggtgggattgggcagaggcaggaggattacagattcagactctgtctgtgttacagactgggttcaaaggccaacctgagtaactcagctagatcctgcctcaaaaggaaaaaataaaaaaataaaaaccaaaccagggctgtggcttattggtagcttgcaagcctggaatgcctaaggccctagattcaatctccagcattgcagggacaggggtggggagggggcaagggtggggcggagggggggggaggataggacacatggtagctttctctctgattccggcattactcagatggtcctggcttcctagaattcttaatacaattccagacattttcattagcagccctcacacatgaatcttctctcaaagtggctcttgtggctttccacaattgacctgacctatctctagcctctcccagttccaacccacctagatcactaagggaaaatttacattcttaaagcaatgctttgattaagttccccggtttcaaaaccatttatctccaccctcgagcttctgagttaaggccaagctgttaaagccctgtaataatcccgcacacccagtatattctgaccaccaccacgcttgtatacaaggcaacctggtactctcagtgtcccaggaatggacaggtggcccttactcccccactgatttgcctatagatcagatgcctgaaaccaccgttccctccctattcgctctgaaagaacattcctgaaggtgttctactaggcgcaatggaagccaagcccgagctctctgcctcgaaatgaagtgggtgggaaaggggtggaggtgagggtgggggtgttgtgatttgtacccctttcagggaaggtttgcatctccaactgcccagtgaagcgggaggctttcccccaccaagacacagtcccgctctaggctcaagcactgcaggaaaaaggaaaaatccaaagcctgggaagatgcctagcaaactctggacttccaacaaacatctcttgatggtattgaaaaacattcaagatagtagactttattcacgtaaggttactgttctccaccagccgccctttcttctcaaggccagggactttttccttcatccccgcctgcctcaggcaagaaaaaaaaaaaatcaaataccttaattttgattaaaattggcctttgatatatatgaaacaaattttcctgtctaactgtgtaagaaatgagaaacttcgtaaatctctcttccttaatccctatccagcattgaaattctgctttcttgaaaagaactgacctggatcgcttcttattaaaaaaaaaaaaaaaaaaaaaaaactttgtatcttgtctgaagagtcaaatcaccccaaaaatctccattcaagaaaaatgtttgttgtgaaatgagatgtcagggtgaacggtctacagacagagcagttcacagatactgagccggtttaaaaaaaaaaaagccacattgaacccccaattagaccttagtctaggggtgccaaaagcgtcttcgctacccctgtgctctctaagctgttgattcaggggtttttctagaacagaaaaagcctcctatcatggaccgcgctgtttgtcacccttcccttactaaagagtgtacgtgcgatgtttatctgagatctctgtcgcgcttagtcagtcatctagctcagccacctacaggagcacgtttccttaaatcagagacgcgtggactctacaggagaactacactacccagcaggcctcgcgcctttcgcaggaaggacgtctgcgcactaagatactcagttccaagtttggagcttttagctgccagccctggcccatcatgtagctgcagcacagccttccctaacgttgcaactgggggaaaaatcactttctagactgttttgcaaggtgtgcaattccaccttgactccctgaaagtccatctgctgcatcggtcaagagaaactccacttgcatgaagattgcacgcctgcagcttgcatctttgttgcaaaactagctacagaagagaagcaaggcaaagtcttttgtgctcccctcccccatcaaaggaaaggggaaaatgtctcagtcgaaaggtaagagactgtttgcattagttgcaaaaaatgcaaaggcttatgcatgcattcgtgaatgcatggatgcaattttcgcccggcgattgcatttttaagtttgaggtttgccacagctcagttgcatttcctgtttagtgtgtgtctttttctttctttcttcctttcttttccttttctttccttttcttttccttttcttctccttttcttttctttcttttcttttcttttttctttttttgcagacacagagagttcctgtaaggcagggcttgcagttgagctgtgcattgacattatttgcattcttctgctaggattaccgagcctttctgccttttgcacggtcaggagagatatagcaggttggtagcgtccaaatgtgcaatgctttatataatagtacatttctttagtatgcacgcatattcacagtaattttgtgtgcaacaggaatccaaactttcaaaaagtctcagaggtgaagatgaaaggcaaacctcgctttaaactagcaggaaatttctgtgatcttctattctttggggggaaggaaccactgcggtggcagcattcagcttacatttttattgatttcgctgtggacattaggcaacttttgattttttaagggaagtaaaggtgaagtctggagagcagtgtattattattattatttaaaaaaaaaagtcttgctcttccgaggttttatactttgtatcagttgcttgcagaggggaagacctcaatgtgttggccatttggaagatgcttttgtgtgtgggggaggatttcagggggtgagcgtgtttgtgagcattagagcaaacctgagactttactgtctcattggcaactacagtgaaatcttctaagtgtgtaactgcatagacttggtcagaagttcaggactatggttgccttctttttctttttcaaatttaattaaaaaaatgttttgtaaggttgtattttgcaaacttactgatgttctgtagagggaactaaaaaaaaaaaaaaaaaaaaaaaaaagtcctgcatggagaaactgcagagctgcttaggtgcctgctggaagacctttaatggcttgtttcgagagcaatcttccttaacatagagaaatctgatggcatctgagaaaagccccaaaatgaagaggtgtgctaggttaactggggccacctctagagcaagatctggggacattaaagtatccaataagctttggccacactgtgtttggaggtgtgataccatttaattctaccggatgaacacgatgtatctgatccggggaagaaaaggattgctcttcagaatttcaagtaagattgtttatggttgttctttatttgttttgtgtttaatgttaggggaggaggaaatattttacctgtttcagaaatgtgcagatgaacctagaagttggctttttttttttttttttttaaggtgtggatattccttagcttgggaaaacccaaactcttgagcagagaattcagagagtacaaaagtcagtccatgctatagcaacactaaagagataacttctagttcctttgtatttggtaaacatgcactcatgcattcaattcagcttaatatatgtatgtatgcaatacatgcttatgtctggatacatgtatgcataattatttgtgcatgcacatgcatatttgcatgtatgtgttatgtgcatagagtttgggggtacatgagaatatttaaaatgaagtctttttctccaagaattagcgtctggtttgagaaagtaagaatgtgaggacatttctgtgacacagattgggccagtgagatggccccatgggtaaaggtgcctgctgccaagccgactatcttaattccatcctccaaagccaaatggcggaaagaaactcctacaagttgtcctttgacctccacagttcaccacgcacacccccctacatacagaataagtaaacagaattataataaaaacatttaaaaaaaaaacccagctattgaagagaaacgggcctaccacagtttcgaggcaataatgattcttttatttggtgagttgtaaggaagctgcaggaggaaggctataggtactgagatccaactgaccttaccatcacccagtttggaccttgggctctaaagtaacttcctctctccatagtttctggtcttacttgtaagataaatcactttccccgaaggtcatgtttttttttgtttgttttttttttttgtttgtttgtttgctttttctttttcctttggaagctaacagggaggtatgtatacactcttgatcatgaatcaaggatgggtggtccttcatgttagtttccatttatgtagatgaacttcttctaccagaccttgcttgcaaactatatctggtatgaacatgagggtttgtttgtccaaatggaaagttattggtggaaaaatgtgggcaattattctagaaatggccaggggtcttggcctggatttttttatgtggactttgcctggctcagcaaggctgacttcaaatagccaaaagcacccccccccccttttttctacttagttccagacttctttctaatactctagccagatgaaatgggaggaacggagagaggtgggtacagtctcacagtatgaagaatttaacagcatgttcaattcacgaacctttacgaacttttcagatcactgtaattcagttttacagacctctaatttaaggcatagcagaggcaaagaattacagactgcccaggagctggaacgactgggctgcttctcctcagccttttaccaacagtgagattccaagaaagaattttcttaaaaagagattctgctttccacagttgtaagtttaggtggtatgtttctcagtttgtttgtgttagctgtctggggttgagctgacattttttttttttctttttcaaatattaaagcagtagtgtgccttttgaggaaatctgaaatgtaagttaacaggaagggtccaagagagtgccggaattcctgcatattacaggaaggcaagccacaggaaaagtgtgtcatctacactagccggagagaaagctattgtgatcggccaaaatggtcttctgaggaatagaaggtgttctagcatctcctggtttacctgaaaatatataaatttgacccctttagcagccagtctttcttgcttctttttctattcaccttgaaataaaaaaccacgaaacaatatgagcttattttagttgaatgcagtcataagtaagtcatgtaagaaatgcttccaagttgtacttcagaagggacatggaaaatggcagggaccatctcagccttcctgagttaatctctgcttctgtaattcactctccccgggagcaccagatgtgtacatttctcattcagtgtacacgcctttgttgggtcgtatcaggcagacttgtcatgcttagcctgtaatctgagctggtgtgttttataactctgttggtctcaggacaccaaggcagaattggcaccttgggcctcctgtttgctttgtgttggtgttgctttctcttctttctagcatggtgtgtgtgtgtgtgtgtgtgtgtgtgtgtgtgtgtgtgttggtgatgcagtttctggacacaagggttgagattctcagtttttcacagattaatactattaattattgttttctaacaacatcccctcatctattaaaacctaaaaaatttacaaggagtagttttaaacctttaaaatgtttataaataatacttctttttctttttctttttttttttttctttttggcttttcgagacagggtttctctgttgtatccctggctgtcctggaactcactctgtagaccaggctggccttgaactcagaaatctgcctgcctctgcctcccgagtgctgggattaaaggcgtgtgccaccactgcccagcattgtgtgtgtgtgtgtgtgtgtgtgtgtgtgtgtgtgtgtgtgttggtgatgcagtttctggacacaagggttgagattattctttattattcttctttattataggaatattcaatagaaaaggaaaacaaaaatgactaatgcctgcatattacattgttacatagatgctttaggcttttggtctgtgcctatgagtttgaaaaatgtaagatatgtggcccactagtgcctactagactacttttcatttcaccaatgtactatgaagtgtgtctgaatccatgtacctctatgtttgcagtatccagttccattgcatttgcttaagtagaatttcaatacctgttttcttcaagactctttcacacttattgccacatattcccgggcaaatgacagcaagagactgaattccaggaagtcaactgcagattgtgaatgtcgacttctcctttatcccccagtactttctctctgtttcaaaaccaggcttttaccatccttagtatataagtggtccatattacttgaaaattttaaaccaaagaggaaattcatgatgagagcacacaacttgagctaactttgatggtgcatgccttttaaatcttgaaactaggtagacagaggcaagtggatctctgtgagttcaaaaacatcctggtcaacatcgtgagttctaggccggccagggctgcatagtgagtatctcaaaaattgcacttgtgagcatgcacacgagtgcacacacacacacacacacacacacacacacacacatacaacctcaaacttctcagggataagttgctgttcccttttgataactatctttgtacacacagtcttacatgtgttattttactgtttgggatattttccttaaactctcccgtgacatttggctgtcttcccacactagtacacacgcagtaacctcactttttgttatagttgtgagtgttttgacttgtaagaacacagccacacacacacagtcttccacgggctttcacacaactgccattttatttgtaggcagaaacagcattgcaaggaattccttggaattagcttattgcacagcagctcaatttgttcattcattctttctttttttaaagtttgcattaaaaaccttctcatatgatatcttttgatggtattcttcccctactgcaactcctccgagctcctctctacctccctaccatccaacttcatgttctttctctctctgaaagcaaaaacagaaacaaaccaaacttaggatgggcaaactacaaaaatatcaataaaacaaacaaacaaacaaaaaattagcaaaacaaaaagcagaacacacacacacacacacacacacacacacacacacacaccttacctatgcaccccatggtgtctattttgtgctggccaactacttttggccagttgataaatggtatttatatttgattcctacttacattttttgaagtaataagttgaaaatgttcatttttcttgacatttctgtttcatttgtttcccccctcataaaatatatcttgaacattttcacataaagataaaattatttttatagttaggccataaaaccccaagactgtagcagttggataatcatacattaaaacttcggttctatacaagtaaataatttcattccttgataagttctaattttatttttgaccaaaatgtcttgtgtacatatcacatattttataatgtaaactcagtatgtttacactgtcgattgctgtccagactcacatgaaaatcagaaagaaattacaatcgtctactttgaattcctgcctgaaaaaataatctatttctgggtgtgtctggagttctaattgcctccgctgagaaaaactagcttttctttagtcttataagtaatttttaggtagcacctggttgttttgtggaccttgatagaaaataatggattgtttcagttttaattacaaggctaattccaaggagccgttgattgaaatttacatcattaaaacaactaagcctacagttaatggtgttgacctcccaagttacctgtcaggcaggtgtgatgcattcagtagctaactctcaggaagcctacctacctatgcatcctgggacttcctgagaagacttaaggataggaaaagagtccccagcacaggtttggcactccgcaaataagcgggccaaggccttagaatcagttcggtccctgctgatattccagccacaggtaaaggtgacttgagattccttgtccaaagttcttttctctgagctacacagcaacaccgttcatccacgtttataataaactcctccctgctccctcagatgttagtgtattttacatttcccattttgtttactttgtggggagcagcctgaggggcggggagggggcagggaggaaggaggctgatgatatagttatccgagcttattattcatcacccaagaaatggtgacccatgaatcatggtggtaggatttcttaccagttctctgccaaaagagagtttgcaaatgctcccgtcctgactgccagttgcttaccgagttcgtctctgagctttaagctctataattacagtttgccttttgtggactatctccttggagagatcttgctgggtaggtgaacttcacatatgtttgtgcttccgtaactctttcaaggttcggttttgtttatcgataactggtaatcagtgttttatcgttaaccagtaattggtgttcggcaaatattttctgaatttatttcttttcttcagcagtaaggatggttgtcattctccaccctcccccccccacacacacacatacaaaggtttgcagtaaataagctgtaaacacagttgcctttactcttccttgtttgcattcagagtctcattatccctctgcttgctcatttggaagttgcaaaaatagcaaaaagatagtggttccttcctagataaccctgtaaacaggtttaaagtttgcatggtcctctactaactttttgttttaaaaacttgaggagaggttgggggcaatggctcagtggttgagagtgctcattctacaatcaggagggtttcatttcaaacctccagcacccacatacaaaactgcaggatttaagtacccgtctgtagcgtcgctgggtagagggaggcaggtgagtttcagagctccgtggccagcgagcctagctgcaatggctgctggttcagtgaatgaaagatcttgtcttaaggcagtaaggtgaagagcaacggatagtcctcccctcctacgttgagtacgtgcctgggtaaggacttgccggcttacggacgtgtcacgcttgtgtagcgcacacacattcaacacacgcatacacaagcatacataaaaacaaaaacaaaaaaacaaaaacaaaaacaacaacaacaaaaaaagaaacaaaagggaaaagtgacatgccgaggatgttgctcagtggtagaggaggtgcttagtcattgggccccaagatgaatggcccaaaggggcatggctggtaggacagaaatgagcccctcgcggctgtcgctgcttttagtttctatgtctatcgatttttttttttttttttttttttttttttcccgaggcagggtttctctgtatagccctagctgtcctgggactcactttgtaaaccaggctggcatcgaactcaaaaatccgcctgcctctgcctccggagtgctgggattaaaggcgtgcgccaccacgctctgctcctctatggagttttttgaagggtagttagaggcaattgagaaaaaagttagcagtaggctttcctccaataaaacagatctgcgagcacacccagtcaatcctgtgattccttacttccgccttgatggccacctaggccattgccccctcccaaccccgccccccgccgcgtgcctgcctggattgtccccaaacttgtccgtgtagtttgatatctagaccacatgcctgctctttctattttgaagaggagactctgggaagtcgatcacaatctcttgttacttggttagctatgctccgagtcaagtcttaaaggggcatttgtaagatcccccagtcgtgtgtcttgctttcttacctccttaagctccctgggctcagtagtttttttttttttttttggtttttcgagacagggtttctctgtatagtcctggctgtcctggaactcaccctgtagatcaggctggcctcgaactcagaaatccacctgtctctgcctcccaagtgctgggattaaaggcatgggacaccaccacctggcttcctgggctcagtcttagaggtagatccctaccttgcacagcattctgaaatgctgtaacacctccccnnnnnnnnnnnnnnnnnnnnnnnnnnnnnnnnnnnnnnnnnnnnnnnnnnnnnnnnnnnnnnnnnnnnnnnnnnnnnnnnnnnnnnnnnnnntgtcacgtttgaaaatatcacataaatcccatgggcagatgctagaagctttaatttacaaatgagcaaattaactgtccgtccgccccccccccccatgagggctgatgggaagttgaggaggcaggaagtacaagacaataaacaaacaaacaaacaagaaaggaaggaaggaggaaagaaagaaaggaaagcaaggaaagcaagcaagcaagcaagcaagcaagcaagtaagcaagccatttcccatgctttaaccagcagccagaaaactacaacctctgtggcacatcctatgagtgaaaccgatttcctgctcagtttcggtagtgccaaaaatcaaatccagggcttcgtgccctctatgcctgctctgctgggctttagcccagctctaatttacattttaaaaatcgacacctcacatgtagagtgtagtattataattcaataaatacatgcaaggaatgtgagaaaagctctagtaataattgtcttctctctctccatttctgtgtactgacgacctttaaactcttcttgtccagttatcttgaaatatataatttctttcaactctatgtacactaccttgggtgaggaccgtgcaggtaattcttcctatgctgggcgagaagctcaattggtaagagtgcccagttagcattcatgaagccccatgtttgatccccagcactgcctgaagtgggcgtggcggtgcccacctataattccatcacttcggaggcagaggcaggtgggtcagaaggtcaaggtcatccttggctacatagcaagttagaaactagccttggctatgtgaaactgaatttcaaagacagacagacagacagacagacagacagatggatggatagatagaaactgaatttcaaagatagataacagacagacagacagacacatagataagaaaccaacatgaaggagaagggataaatgtttgtattttactagattttggttcttttgtttttgttttctttgttttgttcaagacagggtttctctgtgtagccctggctggcctcgaactcagaaatccgcctgcctctgcctccctatattttgccagttttcaacaactgcaaaataaccacaaaatgatattttatggtgagtgagagatataacatccaaattccatgtccacaaggaaaagtttcatagctatgatcgcttagtttctgtggctggtgttggctccccagtactaggatggggtaggtagttctaacagaatttctgtgtcccacaaagtaaaaaatatttaccgtttgtccttccttgtctgagaatgtttgctccgactttactcaggtgagtggcctcagtggggtcttgttatggcaggactcaggccgcactcctcctcgactttggtgagacattgttaacttggatcactctggcctgccattcctctggccacctcttgggcccagctcacaggaaatgtctgagtggcctttctcctagccatgagaatttaggtcattgctcatttccgcccgaaacgccactcatcccctttatcccgtctagggtcctttgcccttccctgtgcggtgcgcttcctgttggctttgccccttttgctttcctctcattgagaagtctccattcatttttctccccgtggtctccgtcctctccttgatcttgtggtttgttagaaagtgcgttcaaagcctcatgctctcgcctttgtctagctttgctgacaaagcatggcctggcccagaggttccagagtttctgttgtgtgaagatgaaagtcttcttccacgctagaacattctccatgctacagggagagttttcaggttctggtctcctgaaaacactggaatgtttgcttccggttatccctaggcccggtagcttgtttaatggcagcttcttggtcatgctgtgagtgcccctttgtttatagagttacttaagtcatgtgcactgtgtatacttaagaggcatggttgtcataaaggttctgagagtgaaggaaagtgaaagatgtcggaggacagagacatttgggcagggcgcgaccagattttttaacttaccttgattgacatacagtgaaggaactagttcccaggcgtccagaagggggcgctgctgtgagttcactctgtttcagacactgtgctgctccacgatgcctgtgaattattatatcgactctccctcttgctcagtgaggtgatatctcattttgtagatgggcaaaccgaggccagagaggtttaaaaactcagatgtcagttagactgacagtagcagagctacaggaggttgtagtcaaggtccacgggagtccggaacctgagctctgttccactttggaaccgtacctccaaagtccatttgcaaaaccctatgcacaaaaaggaatggttgcggattgaaaatttgacctgagtccatgtgggcgcacgtggatttgggcatgcctgggtcagtttggtaattaagaggggtgacctgtgtctaactttttataagttcctttagccatgtctctttaagtgtctgttgagtgtgggacgccgagtctgacacattctgattcttctacctgttgagttgcaagcgtacacttctatttggttgaaagaagctgctacagttgatcagctgacaggtattgatgaatgtctcctggaagtttatgttaaaacattggtagcagacggttttgttcgctgctggtaggttggattgttgagaaactgagacgatgcaaatggtgtgtgtgtgcgtgtgcgtgtgcgacactgctttaaaccagaacatagccaaccctggttcccttttggcttggctatttcctttcttcctggttatttctatagaagtttatcaactgcaatttccttgaaattatgaataaacccctatctccaccgtcttcctcttgtattggacagtgtgagggaacctgagattacatctgtgtagttgagaagctagaaggagttgggaatgaatagttttttttttttttatttacttaattatttgacacaaactcttattatatagcttaagctactttggagctagctatgaagcgatggataagctacttttggactcaaacaggctagcactgaactcgtggtgatcctcctgcatccaccccttaagtgctgggttgatagttgtgttccaccatgccagctatgcatctcccaaagactgccttcttgtcttttcttgcagccaaagctgagcggtcatacccatgcttcaacctgtggaaacggaggatgtaggtattgtgtagctgggaatttagtctcttccgttatcctctgtcctctaatcacacacatgatgggatgacttaggcataagagcaagactgtggaatcttacagagcaggctcctgagaaccagtgaatacacaaaagcagctctttgggaggcatttgagaacgatgcgttgcacgattcccttttaatttacccctttccgtactccatacccactttgtcatgtgacaaacaaagcaaacctcagagcagtcccagattggacgtatttaaaggggaggctccggcggtgattctgtttggagcaattcaacacgtagacttttgaaaagttgttacaatgtttaaggcatccggctggtgagagagttgcggctgggtaatcaggatactggggatatggcgactcagcgttaggagcacttgcggctcttgaagaggacctgggttcagtgcccagcacttacgtcatgactcctcctgcattcttctggcttccatggacagcagtcacgcacacagtgcccatgcatacatgcaggcagaacactctgcgcgtaataatacatctttgaaaacaataatgtgcagggtggacgtggggaaagtacacttggctctactcttctcatcattccctaggaagccttgcaacaatctacttcaaccccaagctgccaagtccgccccttctcagtggagagacggacactcattgatggagctgtcaggaggattaagctaggttgtgcgcatgatacgcgtcgctctgtgcttggccctcattcgatttacaagtgttcactgagtgcgtgtccgtgtcctcacagttggtaggggaataggcgtgtgatcttcagagttgatgaggatttgagtccctgatccaaagtagaggaggggaggaatcttgcctctagtatcgaggggtagcacccgaatgctggtataggcaaggcagcttctcagaagagtagaaaggcagaggaaagggcagaggaggaaatgaccaggaaaatacctgggcaaagaccccgtgcctcttttcaaagcccttcgtttttcatagcaaggtaaacacggcactgtttgtaagcggcatgtgtcctgtgtcacgcttttgggtagtgcgcttttgcattgtgggaactgcaggaagcctggcggttaatagttaagcaagtatattgtgccagccaggtttataggcacactgtaattatatacgcaaactggtggttcaatagtcagcgtctcgctgggtcagggaatattttcccgagcacggttgcggtacaattctcattttttttttttttaataacctactcacatgcgagcttcaattttctcttttccagagctgtttgcaagaggagcaaagtcatacagtatacttctaaattctcacgttagagtggcgttctagaagcctctttttttaactaagccaattctctcaagacagtcatatacacatggatataacttatctcttaaatgatattttcagggaattgtctgtacattttataattgtacctatagcgacatttctaaaaacatacactttggaaaataaattatatcttctggaattgatagattaaattgattccttctgctagctccaattcaaaatcataatgaccttatgctcttagtctcaaagtgggctttttctccaagaaaaaccctaaacttagtcaccatcatttctcttccccaactctgttcagagtcagaagagtaggcagggggtaaggtgaacccctcccaggtggaggtgagccaaccacagagctggttcccctcattttgctgagcagttacagaaaatgtcaaagctagccaggtgcatagcacatgccagccatattgtttcttccaggttgcttgcccagtgatctgtgagattttgttcttgggtgagcttctgtttatgaagggaaagtaagagaggctgcagattccatttcggaagtggtttcaagaaagaattgagatgttttgatgggtttgagttagaatatttttctccatcctgaatttcaatctttttttttttttatgtgagtgcttttatgtctctctctctctgtgtgtatgtgtatctgtatgtatgttgtgtgcatatgtgtgtatctgtgcatgtgtggggtatgtgcatatgtgtacgtgtgcacatgtgagatgtgtgtgtgcgtgttcccgtttgtgttcatgtgtatgtatatggaggctaaagagtgacttcaggcgttgttcaggagtcatccaccttggggctggagagaagggttagtcgttaagagcactccctgctcttgagaaggaccccagttcaagtctcagcaccgacactaggtgactcacaacctgcagcttcaggggacccgatgccactggccccctggaacacctgcgctcgtgcatttgagcgtgtgttcatgtgtgcataattaaagatggcatgattcttaaaaagaaaaattgataagagaaaagtcacctcccttgttttgtgagacaatggtttttattgttctgggctccctgattatctggctaggctggctagccaaggagctccagggatcagcttgcctccacctctccagtgtcagtcttactagcgtagatctctacgattggcttctttctgtgggttctggggattgagcctcagtcctcatgcttgcatagtaaccaccctttcagttcttggagctcagcctttctaatgttatgtgtctaagagaaagtctctggtcagtactgagggtggtaagacttggagggctctgtccttcttggttagagcattactgaccagcttaaccccatcctgtgtaccctgtatagtgctctgtggatacagagacagagtcctgtgtctgccctctagaagcctatttgttgtcttgtgggatgcatttgtatgttaaggctgctgggacaaaggatcacacgttgggtggcctgaacactagacagtaagtgtttcctagatctggaggttggaggtctgaagtcaagctggcagtaggttttgcttctgagggatagggcggtgatctgtgcctctctcctagcttctggtggtttattggcaagcctccacccttcctatgtagactcgccacccaggtctttgccctccgagtcacagggtattctaacttgtctgtgtgtctggattcaaaatgttcccccccccccccgttttttttttttttttaaataaggaaactagtcatactggaacaggggcccacccgattccagggtgacatcatctcaagtaatgacatgcaaccaccccattttccagttaggtcacattctgaggtgttggtagttagggtttcagagtattaaatcttggagaacacggctcagcctatgtatgacttgggggaaacaaagatgccagcggacctatgttatgctgtgtgataagcaggtaaagaaccgaacagaatgcttcaaggtactgatgaaataaggcttgtgggagacggggaagcctgtccgcaagggaaggtgattttctgtcatcgtagaggttaaagtgtgcttcccaggagaataaggagataaaacagagtctcattcgctggaggctgagaacttctgcaatgggatgtgttaagttagaaaacaaatgtgcacaagcacgcgtgaacacacgccatgttgccaccgattcccagcgctggcgacttattagtagggagactaatgaatcactttctggggttgctatgggcaactctgtggtatagacacaggggcggggtcttaggggttgagggagagggcttccttcccattgtaacaagtggccatagtctctgtggagcgaaggttgggaaatgagagtcaggtctaagcatctgtagccaagagaaacttatttttagaaaatgcctgcaagccttaatgaaaaggagtactgaagtattaccaaacttttgcaatattgacttttttggggggggtactggggatagaaccttgcatgtgtgaggctaggatatgtctattggcgtacagacccagcccttggctattaacaaaaggccttttaagttgtgtgttggtgtacatgtatgtaaactaaggagcagcttcatgatggtaacagaatcaggacgatcagcataagagtcatatgttggaatgccaggggctacttcacgagaagagccagtgaaggaagaaatggttggtcatggtgctgatggttaatcactgggaaatagctttgttgttgttgttgttttggatgcatctactgtcccaccggcagctaatggccagtctggaagtcaggtgggcaacctggagaatgtcctgggatgggggtgggggtggggagtgaagattaagtccaaagctcataaaatcatcacctgtatcgttgcacttaaggctgctatagaatgaggtcatcgggaaagagggcagagatgagacaaatgaatgaacagatataataagaaggctggaaggaaatgcatggaaaagggaagggaagggaagggaagggaagggaagggaagggaagggaagggaagggaagggaagggaagggaagaaaaggaaaggaaaggaaaggaaaggaaaggaaaggaaaggaaaggaaaggaaaggaggaaggaagcaagccagcaaccagtatgcctggctagacttatatttcaattagctgtaatgtggaggtcatcttgggctaggtgaaccaagcatccaaagaagccaggcagaaagttagggatgaagtaagtcatcgtggaaaggaaggaagacagaatggagaagccaatccagagcattgagcagagagtaaaagagtccaagaaatcaggctaaggtgtcaggtgcatgggctggagagctcagtggttaagagcactgtttctttctccagaggacctgggcttggtttctgtctacccacactgtagctctcaagtgtctgtaactccactcccaggggatctgatgccctcttctggctgctatctccaggcaggcacagggtaggcagatacacccatatgccaagcacaagtgcttatgacattcgaaccctgtgcgtgaagagtgagcctctacctcactcatctcttccattttcagagcaagttgttcttctggcaattgtgtgaagatgtatttaggagaagcctgaggaggcacctacagaaggatatgcagaagaaagagcaacagggcttgttccaggcgagcccagacttatcttctatgctgagcacctgtgcccggccggctctccaagtggctccggtggaatcaagggccagcaggaggttttgaaccagctgcactgtcagctcctgaggtttaagaagcaacgcctagtgggttttcctctcaggttagagagtgcacacaacacattctagaaagtctatcgaatacatatcagggtcttgcagagaggttcagatccccggagaggttttagccctttccagactgagcgtccactctgtgctctacgacagacagtttattttccttaagcacacagagctttgggataagctccaatgcttataaaagcccaggaagtggatgatgttcccatttcataaagaaggaaattggaaatcaactgaatagcttgtccttcaccacacgtcagtgtacgcgaagctggcatctgaatccagttcatttaaacccctccctgcctgctgcctcttttctctttttgattaaaactaggatctttagtatgctaggcaagcattttactaccagcctacattcccagcccaaatcctcttaaattccaaagtcctcgcttctttgtatgccacgggtatgctaaaacagtggggagagaataccgttatatgatcagatgtgtgcctgctctcacaggttatggaggaggaaaatgccattagggggatggatggcaaatgctgggatggagtagatatgagcctttctggagcatgacaagaaatgactgtacccatgtgtgtacttgtgtgtatcttgtcttagtgtcaaataaaaaggtctccatttagtgagaatttcaccgagtccagtagtaaggggctcagctcagctgggcctgggagtgatttgttctctgacacactccctcctccttgccctccttcctccttgccttccctcctccttgctctccctccttcttgctttccttcctccttgccctccctcctgcttgactccctccttcttgttctccctcctccttgcttccctcctccttgccttccttcctccttgcctccctccttcttattcgccctcctccttgccctccctccacagagttctcattatgccattctctgggatcatctctaccctctgccttctgcattggaccagaatttgacacataggattttgtagtttctttctttcttttttgcttttttggatttttttttccaagacagggtttctctgtatagccctggctgtcctgggactcactctgtagaccaggctggcctcaaactcagaaatccgcctgcctcagcctcccgagggctgggattaaaggctgtgccaccactgccctgtagtttctttattggtgccatggtaagtgggtggaagtcctggggattgaacttgggtctttaggcttggcagcaggcccctttacctgctaagtcatctcactggctcgcctttctagattctgtatttactattcctgggctacttctagtatagtctgtggtctaaaatagaattctgtatgtttcaaaattaatcctctaatgagtggctgtttgattgttcaggtctagatcaagtattcttcacagtgctcacaaattatcaacacatatcactgtccacttaggggtgttgtagaaccagatcatctgggcagtcaggggagatgggacaagccaatgaggtgactcaataaacagggtgcaaggaactgcatgggatacaatgaaagccaccagcatgcctgcttagacttaaacttttttttgtttttgtttttttgagacagggtttctctgtgtagccctggctgtcctgggactcactttgtagaccaggctggcctcgaactcagaaatccacctgcctctgcctcccgagtgctgggattaaaggcgcgcgccaccactgcctggctctagacttatacttagttatccattttactaaaacttgaggggatctgaataaggcatcagatgccctggaattagagctagagatgactttgcgtcactatttgggtgctgaaccgtggacccctgcaaagagtaagaagtgactttgtctctgagccatctccccagccccaacgtttagacttacattgaatgacatggtgatagcattgtgagcagtgatgttttatatcattctttttattgtgaggtcgaatgtgtagtaatatgtctcggctactggaaaggtatattgccttagactggcgcatatttactgtgtgtagaagagactgtgggtacagaccatcatttattgtgtcaccagtcacctttgtatggagtctactcaggtcacaaaatgaatattaaaaaggctagggagatggcttgccttgaaagcatcagatcctgggtttgagccctggcacctggatgacagaacccggcctggtgacacgtgctcgcaatcccactaatggggagttggagacaggagtctctctagggcttgctggccagatgccttagccttcttggcaaggtccaggtcagtgagagatgctgtttcaaacaccattgatggtggcacctgaagaatgacacccaaggttcctcagtggcttctgcatgtatacatatacatgtgcacatacccatatgtacacacacacacacacacactcacacaccaataatgcagcctgattaatcagctaaagtcatgcccttgattaaagaaaataaacagaaaatcttactggtgttttctgatgctcaagtggtaaattcaaggctgtctgactatgtgacagttgtctgaatagtccgccccgtgggtaccagacaaaatgtaaagacgaggcaatgcagtcagaaatcatacatatacttctatcttagaaactatgtagaccagacaccacgttttagagatgaagccgtcccaatcaagagcaattaaggagagatgccaggttattggtgaggccccaggggcagggaaaccggtcttctgaagctcatacctggattgctggtagcctctcaggagtgttttgatgaagagttgaccttgactcatggggggacccttgcattccttctgtaaaagcagacgctaactcagtgggcttaaaaggaaagaaggaagggagcttcaagcacagtggagctcagggtctccttcgactgagcaccaggtaattgaatgggcccactcggttgttctgtaatgcacatggccattcatccatggccattaattatctggttctctgggtggtttttggagaggtactgaggagtgtgtagagagaagaattctctttctctctctctctctctctctctctctctctctctctctctctctctctctctctgtctctgtctctctctgtgtatgtatgtgctgcagaggtcagaggtcaaaccagatgagtccctttatcatttcacaccttattattatttttttttcacattttattttttgagacagggtatctccctgaagctcgcataccatgtaaaaagggcaacagatgaatctgctggctcttgtggtttcacgatagcccccaaagatcccaactgtatggatctttcaacacaaatgccagaaagaggatcagaagggcagaggtggagagggcagacacactttgggttacccagacaggatgaaacagctctagagtccggaaaatcctgaagttctctgtggtgggagtgtgggggggcgcaccaggtaactcagtcagagttgagacaggagcagtggatgggcacccagggagatactcattgaagggctgaactgtgccatcaagtgtgcccgacatggtttcttccagcaactcagtgtaatttagtattttggacccaactgttcatctacatcccttagcaacaggggttttgttgaatattctgagttcagtaaggagcagagagccagactggctttgaggaggtgtctgtggacaagtctacagctaacttaatcaagtgatcaagaaggaggaggagtttgttggggctgctgggtattggaagtggctttctttaaccagcatttgatgcttcaactcatagcaacacattgctggcatttcaccgactcgctcttgcccttgttcaacagggcatgccttgaggtccgattatacggctttcatttatacgggcatgtctcccacctcgcgttttgtttttcggtgaactgacttgacatttctgcttgccaagagccggggagtttgttggctctctgctgtatgcttcctccatgaggtcacattgatgttgccccatttgaatgtctgccattctggaggtttcaggaagcagaaactcagactatgtgttctagagctggggggacctttgaaatccctcttactgtgggggaaaaggaagtttctagagagtctctgattctctgttcaggatggacccttagggtgacaatcctatgcaaaaccagatgtaagatgatctctttcagatttcataatgcatcgaagattagttttgcgttactgttttgcaacttgaaatttccaaaattggtattcattgcttggcttagttcttagcaacaaacttagcaacgcagacccaaaagaaattgactagttgcctgtatttttaaagttcatttttagatttatttatttcatgtgtctgagtatgggttgcatgtatgtgtacatgtgtgggttcatgtatttgacctacatatatgtatttgtaccatatttctatctggtgctcatgggcctcagaagagggtatagaaactttgtgaatggctgtgaaccaccatctaggtgttgagaattgaactatggcctctgagagagtaagtgctcttaactggatctctaatgtcatccaatgacttagttgggccttggtgtcctcctttgtcactgggaggtctctttagtctctgtttctaaagaaatgcttacttgggtaggatacacagaagctaaaatgcataaagaacactctgggattccatgctcatgcagagtgttagagggtgaaatatgatgcccatctcatctctctttccttccggtttgactcaagaacgccactcccggtttctctcatttttggttgatgtttggaaagacatgagctacttatatcacagtctacggtttgttgttttgttttgttttgttttttgagacagggtttctctgtatagccctggctgtcctggaactcactttgtagaccaggctggcctcgaactcagaaatctgcctgcctctgcctcctgagtgctgggattaaaggcgtcagccaccacgcccggctcacagtctactgttaacctggatttacacacaactgaatttggtaggcttttaaaaacagataatatgttatcctcttccactctgctgagataaaggataaaccttggatttaatagaagaatggtgtctataatataaccaaaaaagtgtgtgtgtgtgtgtgtgtgtgtgtgtgtgtgtgtagtcttcaaaacagggcagcatcccttcaggagttggtttctctctgatcttcctaaaagttaaagaataatgatctaaaatgtacttcagtctttggaattgatttcaagggagtaaaacagatagatgcactgccaacagccttaggtcctgagacagcagacgactctttaaaagaagcgagcagctgtcagccttccctgtcctttcagggactgagcttcgaggaggcagtcacaaatgagcaggtctcatccggagtctggccctctctcctggagcttctgtccagccagctccttcaagagtagagcttctaaattctcttcctccggggaactctgctttcctttcatgtacagggttagggttagggttagggttagggttagggttagggttagggttagggttagggttagggttagggttaggcttaggcttaggataagaattaaggaatagggttagggttagaaggttagaattacggttagagattatggtcatggttaaggttaggctcagtaggttagggttggcattagcggttatagttaggaattaggctgtcagagttgatgttagggttagggttactttagaggttaggattgggattaggggttagagggttaggctgggggttagggctagccttaggggatagggttaaagttagagggttagggttagaggttatggctattgttaaggttaggctgagtgggttaggattgggattagggttagggttagaaattaggggttatagttagggttagggctcagggtcaggagttaagcttaggtgttagagttgctgtcagtgtctgggttagtgttagaatgagggttatagttcaggaaagttgtatgagaattaatgagaaaaaaaatgccaccatctacttactaaagaatttaaagaactattttatttttatctggtttatactttcatccccaatgtgcagtttatctgcaggtatctagtgggcatagtagctgatacctataatcccagtactcataagaatgagtaaagagaatcaccaagagttggaggggagcctggactatggagtgaactccagttgacctgatctaccatggtacagcgtcttaacccctccacccttcagccatacaccctaacaatttcccatctcaataactggcataaagtagtggtcagcaaataccttgactctacattcctatcagtatctagggctagcctatgtgagcttttgtgctgactaatgtgctttggggaaacctaccttctgtttctagtctgttcattttcatatgtggacctcttgccacacgtatagagtcccttgcatctcctctctacatatgtatattttatcgtcatgaatttatatatcataggatcctttgtgtgagtctcaagtatagaatccggtcgtttttagtaatgcggaaggtcgtgtaagcatcattgctattgagctacaaaatggtttggccagagacaaaggagaccctgtgcctgctgagcaggcatttccgtcttctttcctcggtctggaaaccatgaatctgctttctctttctctatgggatggcttcttctcaacaattttatgaatgaaaatcgtatgacatgttaccctttgcatctggcttctcttagcaaaagggttttagggtgttcatgcatgctcaggcatggatcactgtttcatttcatttgaaggctccataacattctcctatattgataaaccacatttcttctcgttatattttccgatagtcacctattatctagaaaattttggcaaaggcacttcataaatatttatgagtatagctaatacacctgaaatgaagagcctatctataagaattttcaccatttaagtgaaaaaatagccccaaataaagtaatagatcttaaatttcaggatgagccaggtgtgttggtatatatctttatatctttagctcctgtgctggagaggcagaagcaggtggatctctatgagtttgaggtcagcctggtctagcaagttctaggccagccaggccttcatagagagaccttgtctcaaacaccaacagtgtttaagggatggagagacatttttcaggtggacaaggtttcccatgatattagaagttaaaagtcttctagtaaccatgggactagaggaagtctggactcagtagacaagtgcacagtttgatttggtttacctggtacccggctgtgtggcctccttccccttatccccaaacttctgcttgttatgtgggctctacaagtttggctctgtccctgaccgtctgtcaagtttattttacatgcattgcctcatttcattccttccagattcacagagaagaaaaaaaaaaaaaaaagattgtgcacattttttttgtagttgaaggagtttgcagactccaggtgtagaacattaattatttcaggggaatatttcccatccagtaagggctgagggagaaacttagtctgaacttctctgcattatgcataagaggtcagaagaaatgttggtctgtttttattaaagttgctatttatttacttatttgtgattgtgtgtgtgtgttatttgtgagtgtggtgtgtgtgtgcgcttgcgcgtgcaccagcgcttgtgctctatggtctatgtggacaacttttgggacttgatttttttttttttttccttttaatgtgtgtcctgggggatgaaactcaggtattacgatgactgtggtaagtgctttttatggctatgtcgatgaccctcatcatttgttttgagtaagggcagtattataacttatggatgcctgtgatatcaagcattcgacagtgctttgaagatttctcaaagatgacatggtattccatttcaggggtgagtgggttagtgcttgatgtggatagattgcctctctaggatactgctgtaagttaggataagggtgtttgaaccccagggtttcccataatggcgatgacatgagttttttggtgttttctttgtactctgtataatctatctctaccccacaccctattctgttaagtgtgcctgtgggggacagtcagcaggctgtgggattctgctctttcatcccacaacataggcacctttacttcttgttttcctggtcctgccttctttattctccatggacttaataccacccccaccccctttccacccccaccccaatgaatcttgctgtgttgtccaagctggccttatcccgggtgattttcctgcttctgtgtcctggtgctgcagatatggctgtgtgtggccatgcctggttgcctctcattttcctataatgttctttttgtaccatttgggttaaaagaacaccattctcccgagccagcatctcttctggctaaaatagctacttttgctaggaaggacaggaacaggaaactgacggggtgatggtgcataggttaaagcacttactgttcttccagagaaccagaattttgttcttagcgcccactctggtaatccataatccttagcgnnnnnnnnnnnnnnnnnnnnnnnnnnnnnnnnnnnnnnnnnnnnnnnnnnnnnnnnnnnnnnnnnnnnnnnnnnnnnnnnnnnnnnnnnnnnnnnnnnnnnnnnnnnnnnnnnnnnnnnccctctcctaagggtttgctcttcatttgccttttctcccaccttattctttccagatcagttaatttctactggctatcctcagattgaccgtgtcttacccttcaccaactctatctcacttcggagaccatgcgtcgtgtttcagaaacacgtttgtttcttgttgcagctctaaagtttctgtgcttccccagcattgcgctgagacgttcttttcctgtcgtgtgtttaacacacacccatttgcttgctgagtgtctcgtacctagctgctgtactcctcgggcattcctaccatccatagcatctctctgttgaccaacctttctcgtcactcggacatatttctgtttcatactccaagaatgaagtttgattgaaatctgattgtatattatgttataagactggttcttttcgttaaaaaagagatttataaatttatcatgtatatgtgtctgtttgtaagagataaaagaagatgtcagatcctctagagtaggagttgtgggagtttgtaagccattctacatgggtgcttggaaccgaactcaagtcttctgggggctggggggggggagagcaattattattaaccactgagccatctccccagctccaagagtggtgtgtctttgaatgttgtattatttttgacgacctctgctatctctgttgtgtgtgcgcacgcccgtgctttttctcagcttgacacaaactaaaatcaactgggcagaggcaacctcatccgaggaattgtctctttcagattagcctgtgggtctgcctatgggggcattttcttgaggagtgattgatgaggagggtccagctcactgtgagtggtgccatccctgggcaggcggctctgggttgcataagaaagcaagctgagcaagccatgaagaatgagccagcaagcagcattcttctaatagtctccgtttcagtttctgcctctagggtcctgcctaaatccctgcgttgatttcccttggtgatggagtgctacctggaagtatagtatgaagtaaacgctttcctttcataagttgcttttggttaatgttttatcacaagaaaagacaaacaaatatggtaggtaggcaggagtatctccttgctactcccaggtgggggtcaaagtacagatttctccttggctttactgatgcctggagtgatgggtgtctgttactgctgggtgacatttgtccagactccctaatagcttttaccttacatctccgtggtttagaggggcacccagttgctacgtccaacgtagtctttatggggctattgaggaaatggccctgctgccacttcctatataaagaaacctggctttatatgaccttgtctaacacaatcgttagtggaagaggaagtgaccctttaaaaaaaatgtaataacttctttggattgtgctgactaccttaacttactggaaatccacttagctattttgttgatagatcactcttatttttctatctatttgattgcttcctcatggcttccccatctacttcccatatgtggactttttttccagaaagggctttcccctgaggcaggactttgtccagggacactgcactgaatccggtcctctgagcactgtctcacatcatgtgactgcttgagctgtcccctgaaatcctcccactccttgaaactctaggcccacagtcttactccctgagtaacatttgtgcctctacgtctgccaccactcttcactgctccagcacacaacgtgtgtttcctcttgccttctggtctcttccggttctgcttcgtcatctgtttcttaacctctctccataatgatgtcatccttctaagcctgtgcacattaaaccatccggtgccttactcggcctcattcatctttccctacccgggattgtattgaggacaaaaaaaaaaaaaaaaaaaaaatcacacattaactacgcttccgcgacttgtacaagccgtgcaaccttgaaagctttattaaattcagcttccgtttctgtgaattggcaatgaagataatagcaactacagagcctcgattcaaggataggatgagttctctgggtgcaccatccacacgtccttgagacctcaaccatggcagctctggggggttgggggctgtgtctactaatgtgcaacacttttcctgtcctattgcttgatcgcaaccttggtgtttccctgattggcttgctgaggttcccccttgtcttcgcctttctaaagcatccagtttatatgcagctcacttgctgctctctaacttgcactgttgatgtgttttgtgcctttctttgaaaaggtttacttttattttatgtgcgtaactgattaccggctcgagtgcatgctcaccacaaacatgcagggcagtgagtgcccttggaggccagaagacgacattggattccctgggattggggttaacaactgttgtaagcagcgtgatgtgggtgctgggagctgaacccccatcctctgccatagcatctagtgttcttaatggctgagccatctctgcagacctcttctttaaaaataactactcattttacttcacttaaatgtattatctatctatctatctatctatctatctatctatctatctatctatctaatcatcctccttatacgtttgcttgttcctttgaatgatagttctctttttccttcagattttgtacatctatctggttgtagcttaagtgccagagtgttctgtagtgtctccctcccatcccactctttccatttttgcatttggttagagctggattcactgagccatagactgaggcaacataaggtaccatgtccttctcccctcctggcccgcttaagggggttctgtatgcttacccagctccctgtgtcagtatcagaccctgcctgctctatagcaatcgatcactgaaatttgtagactctgcattcttcacctctcaattgacccaagtctgagtgctgaaccccgggaggctctgagataataatggaaggaccggactgtgtctgtgaacttgctcttgggaccagactgatggtccccccccagcccctcacttggcttaccttaatttggagtaagacttcagttgttcccgaagatcacaaactattgtgaatgggtgggggagggggcagagagtacagagacatcagacatcaggtagtacagtagcaatatcaagaaagtagtagttggggcggctggggggcgaggcatatgaaaacttcgtggggattgggtccagtaggtaaaggctcttgctccggagtctgtcagcaaggattcgattcccaggacccatccacaaggtgggaggagaggactgactcctacgagttgtcctctgatttccctccactccccccccccctctctctctcacacacacacacacacattggggtgggagcggagcttcacaagggaagtgtcatttgaggagggtcttggagcttggtcaatgagggatgagagttcatcaacaaggggaatgccttttgatcagagcgaagagcttgggaatatcagaggaggcagagacatatcctatacactgtacgcattcctcgggatgtgggaagatggatctgtggtgtactgccctgagtacatcaaaggatttacttctgcatactaagtcttagtagagctggccttagattactttttaatcccgtcttctagatttgtctttctgagctattgaactacagtttagttactttcagtttttaccccgcttctagctctgtgggtttcagatatcaactgtgaatggagaagatgcacagtgccatgagattttttttttgtgtctgctcatttgaacatctctgtacccaacagagcgctcggctggtcctgaatgatattgtggcgttcagaatgattcctgggccaaagaaatgcccctgtgagaggctacagaaaacgaacttttctgattggggggcgagaggggggggcgggggggcattctagcagcagaggtcaaaggaaggccggcagcatgcagcctaaagggatctggtgcagattccactgctgtcatgatgaatgcatgtagctatctgtttgtgccccctgccaggagacatgcgatgtcaccacactagaaatgctttcaagagagcttcctcagaccagatgtagatactgtcatctttgtcagatgctaaaatactgtagtcactcctagtattctaccattggaggctgattttgactttacactggttgctctgggttcattctctccctcaaaggacggtgggaaagtgcatatccagaacattagcctctataataggtggcaggctgtctttctcaaaaagtaaggggatttcccaaacacagaaggggactcccatgtccagttcagtggtcacaaagccatctgtcctgtgtctgccaccagctctttctctggagtctcttgggagagccaaagtacctgtgcatggggaaagatttccccagctccctaggcagaaggagggaaacttgactcaggaaagtcaggcagtggggagaaaatctcttcgagcttagattacttactgacctcaaaagcaaaagggctggctcagccttagctgggtctgtcagtgagctaattctggctcactaagcaaaagtgaaaatggagtgtggatcccattgccttgatttgtgagcagtgtgcagagactgtggggaaaaatcctatgggcatctttgctccgtattacaaaccagttgaaacagagccatgcttgccctccctctatttatctatttgtgtatgtatgtatgtatgtatgtatgtatgtatgtatgtatctgtctatctgtctgtctgtctatccatccatccatgtatgtatctatgcatctatctatctatctatctatctattaatcatcaatcaatgtacttatgtatgtatgcatgtatgtatctatttatctatccatctatgtattatgtatgcctatgcatgtatctatgtatctatatctatcttttttgctgaaccgaggtaaggactgttccatgctggtatgaaagcagactgggagttgaagtactccgagatggtgacccaaggtcaggaccctgttgtctttcagttctctcattcattttgttctcattggactatgtgtacttccccataaaagtcccctttcctttatgtaataaataaataaataaatagtgcctgaagtctgagccataagggatgctaaaagagcctttgctgttctgcgtggcattggtgctgatgggatggacactccggtcttactacttgggagtggctgtttgggtcagtgacattttacgttttttataaaaagtaaatctggtcaaggctctctttctgtattttgaagaattgataaaattggtttcactcattaatatagtgacattaggtttagttcagatttatttcatattattaagagaaccacgtcacattgcataggaaatgccatgggtatctatatacctaaggaatttagagtttaagccagggggagaaaaaaaaaaacattcttttttctaccctgcaacaaaggtattttgggtacagagcatgttgctctgccagctgctcctccttggctgttatatttaccttcattgccttcatctctgttggtgattaacagaaactggggtgcaggaggtggagctatcactttaagaatatcaggtttatataatccggccaataattggcaattggctattaagcgacaggccaaagcattctcttaaggaacaggagtgccagtcggaaaagacagccttgatctactttagtcaacattttttttttatttgaatgacacatgagaaacctgaacttaggctaaatttggagagattgagttgctggattcacactcccagaacatgggctaagtccacagcagcagggctgatggggctgggccgttgttttctggacctcagtttctccagggaggcttcactctgagtcttcagctgcattagctcctgactccttcatgactaacccactaggaacttgtcatttcccctttttacagaggcgcaaactgcagccagggaggtgggggtggggtggggtgggggctttgaggaattctcttgcagatccagagctagctaagagtagaatgggcacaagcttaggtcggggagacatgctgtctttgactatctactattcttactcatcagcttagttttacccatttcctcgcagatgccaacacacgtatgaaccccccaccatccttcccccatcccacatccatcctgccacggttacagcatttgtcatttagttggggaatgggtgcttcataaacacaattggtggacttcccaaggacattttcttccgagataaggagatgatgctacagaaccgtgtcgttctctgaggccctcgtcagtgcgatccttgcgacaggtgtgatggtgtcaggcgataggtgtaacgtcttttgctgtactctttgtttcctacctagaacggcgtcacatgtgaagacaggtatgggaattttatcgtggaaggccgttgtagtcaaggggcaagtgctaaaagaggtgggaggtgactgcattaaagctgtgcgtttgctggggtactcttgggaacccttccgaagggtgagcatctgtggtctaaagggggaggctgttaataccagcacagcaggaacaggcaggagctgggggacaccttacacagggctcccaggtgaagaaggagttctgctgaaatggagcctgtgtcctagccaggaaataaagaattaccagatggttaaggtcacttggctggccagcctgttttgatcccatactgaggctgcctctggagtaacatggtggacagaggacaggtgactctcggagaaggaagacagaatggagtcttcacaagctgcccttagcgttctggcgctgtccctttaatacatcttgccgttcccaacttctcgccccaggtctccctattttccttttcaatcaagcattgactctgttacctcagcctgtcgggcaaatggcccaaagagaattgtttctgaactcaaatttagctctctaaactctaaggctttgtttgagcaattcacttttcgccatactctttccaaaagatatttattcttcttgtcaggtaattcagttgataacttcagaaataacaattcctcccctcttgcacccccccccccccatgggtgtatggtgtgcatatatgtatatatgaacgcttgcatgtgtgtgcacttgtgtgtgcctacgcgggcttgaagtgtatggtaggaattatccttgatggctcccccactttattcactgaggcagggtctctcaatcaaacctagaacaagcccacacagatagtcctgttgatcggctttgcagtctcttccaaagttagaatcacaggaccgtcagcttttattgggctctggggatctgagctagagaccccatggaagtgctttaacccctgagccatcttcctggtccaagacacattataattttgctgatccacagtgcccagagaccctgctagaggttgatgacggataggcctttctgttcccagcctgggcttgggtgtctgtcgtatcgccacagatctcctagtcccagtcagaatggctaccaggcccaccttggacgtcctctctattactctttgtcctccctagtgttaacttgctacacttctgtctcagctggagctcgctctggacctctgtaattatttgtagccaacctcaggaaatgagagactcctttcttccggggtgagctgatggtctgcagggctgggtgtcctctgggtgcctgccctcatctagactcttcaggctgcggtacggtacagagggactggttacacagccaggggcctgggtccttgtcctcctacttccttcatgcacatcatgcatgttgatcatattcacccctcacttctctctcttctcccttcttatcctgcacatctttgtttttgaaggaggagcaagcctgtctggcatttcccagatgcccctggtggtggcacatgctgtatctggacttattttaaagatgcaggaatttacaagtagtaggtacccagtgtgctgctcacttggtttaagttgaagcctgttaagttcctggcctgacatggagtcattagcatttaagaaggttgctttccagaatgcctggctgggagttaagaagtgtgtgtgtgtgtgtgtgtgtgtgtgtgtgtgtgtgtgtacctgtgccctctcccagggctgcagaagccactcttcttcttgtgcctctctgaggggcccttggatgcctcagccatccctcgagtcttgcctctcgagggatattccggaagtagagcatggtatctcaagcctgtatgtgtaaagggagcccttggatatgtgtgaaaattctgcatcccatgacaaaaatgaggaggtgaggccaataaaaaacagtatgaccaggacactgggcaccttatgtgtctctgtgtgtgtgagcatatgcacatgtatgtgtcatatgtgtgcacacgtggatagaggcagaaagttgatactgtttccctccatcactctccactttccccttgaacctgcagctcatcaatctagctagccactttgtccccaaattcccttatctgcaagtgctggggttattggcgggctgctatgtcttcctccttttatgtcggtaacggggctccaaactccattcttctttcttgtgaggtaagcaggttagctgttgagccggctctctaggtttgacatagttttttggtcatttttccgttgttgttactattattgttggtgtatgtatgtgtatggtgtgcaggcatgttcaagtgtgtatgtgaacctgtgtatgtgttggtgcacatgtttgcgtgtgtgtgaagaggcctgaggctcatgtcaggaattgttttcatttgatcttccagtgtatcctttgagccaaggtctcttaaaccaaacccggagatcacagcagagccagtctactgagccagcttgccctggagatcccgtttccacgttccaagcctagaattacaagtgaaatgcacaacaagtccactcactcagcatttacctgggttctggggacttgaactctggtccttctgcttgtgtggtaagcattgtaatagctgagtcacctttcctgagactggagttacagatgactgcgagccatgatgtgtgtgctgggaatcgaaaccgagtcccctggaagagcagccagggctcttagctactgagccatctctccagcattccacagatatgtttaaaacaacaacaacaacaacagcagcagcagcaacagcagcagcaacaacaacatccgtggcagattctaaatatagaaacaagagaacttagggtcaacatgatggatacaaggcagtgggaacacaatgctttgaacacacacaggcgtagagggaagagggctccatttaacctttcagggaaatgggctggggtggaggtaagtcccgagattccagagcttcattggaacagactctagagcactgagtaaggtctccaccaacagactaaaggaagcccatgggaaacaatgtaacaatgtaacaataaggacaagagactctccaaacaggctggcattggagagagacctgcaagagtgtgtcctggctgaagagagaacaatggcagaggcccggcagtggcatgctggtgctggctcgtggctggttcttgagagtcagttattagatagccagtaattttgtaagccggtagttaaaccattggcagcttgaacgtacaatgaaggcaatatttacatcatggcaatgctgtctcgcctcctccccagaggagaggcataccgtgcatggccagcgcagtatgaaatgctctccctagggcccctccccgtaggtgatgggcagtgagcacagaatggctggtaagcaacatggacaggtttgcaaataaggaagccaccacctctgtgttctggaccctgctctacagaaaacacccattgagggggatctgctggcggggagtttagctgagagtggtgctgtttgtttgtttgttttgttgttttgtttttttgggggggagggggactagagtctgagagctgctgaggaagcagtttcggggaggggaggggttggggggttgggggtgaacaaggggttgaacaatgatgtagctgtgacaaatccctccagaaagctccacagcccatcaaagccccatccaaagatacagagcccagtattgcacacaggctacccttgtgggggaggggtagtgaaatgaaggtgaagtctctctctcccagcacggttattggaggagcctcagtacccagaggagaggatggtcaggttaaaggatatccttgggggtcggggtagagtggggagagttatccccacatctgcagtgagtgaggagatgtgaaacacttgggtgcaataaactgtgatgaaggtacaggccagagccccgagaccgtggtggggattcagaagtttggggtggtgtaactggtagaaggtagagtcagcatttggactagtttccatattgcagtggctctcaactgagagtacagggttgcccccagggtatattaggcaacgtctggagacttgacggggagtttcattcctattagttaacagttactggggggaggggcagtcatttctgttcagtggtccagccattgggaagttgcccacactcccgtaaataaagctccatccatgctcatgccagcaaccctgattaaactcagtgggttacaaacaatcaaaaccaaggaagaaaaggatctgagagtaggaaaggggccttgtggaggaggaggaggaggaggaggaggaggnnnnnnnnnnnnnnnnnnnnnnnnnnnnnnnnnnnnnnnnnngaaagaggaagaaggaaaagaagaagaaggaagaggaagaagaaggaggaggaggaggaggaggaggagagggggtgttagagggagcgagagggagagaggtggtgatggggatgaaacctacttaaggacattaaacccgtgtactgtcaaacagcttttaaaaagtttaaatgtcctcattgagtgcaataaagtaactttgtgtgtgtgtgtgtgtgtgtgtgtgtgtgcgcgcgtgcctgtgtaaaattaggaaatgatgaaacgatgttttggaagtagataaaagcagacaagtaagggacgggagctctgcaccctctctccactcctatagggcagggcttttcaagaaatggaagttaaaaggataaatttaaaagccatccaccgggtggtcttggttagtgtctagggaaagtccccagatcctgggtgcactctgcagccccaaatgagtagacaaagaaatcgagaaagctttagcagggtagggaagcaaaggaagacggggaagtgaggtttggtaatcccaaaaggtgaatgggaagcggggatttaggtcccggggatgcaccgtgcacaaagcacgtgctttctgcttcttaacacgggcgattgagcgaatgcggtttatgctgcctttcattctgaggaaagctggttacttcagagtgataggcttaaggcagaggcactgagatgtcccgagactccttgagaccctgagaatgccactgttgggactttgagagtgtggagctgtttggcaggggccgaggcacagagtctgggatggagaccagtgcagtgattgcttgaccagaaactacaggtttcaggctagaggtgagcaaaccaccttttctctacaggactgcatgggaaatgctgcgggctgtggaggccagaggatcggggctgcacttcctatgctgtaatgcgaaggcaggctgatgacttgcaagtgaatttgacagctttattccgatacatattttctttgcaaaagaagtaggctggatttgtctccctcagtggtccttggctaagactgggccaaagtcatgagaaaaaaaggatgccttcaaaactgggacccatgggaggcatgcagacaggggtggaactccaggggtaaggcttttatagttagggaggtcagactcatcacccccttgtctgtgtcttctgcgcatgtcttacccgtcttaactgattagaaatgcctgcatatgtatgctggcactttttatgttaccttgacaccagctagagacattgtaaagaagggagcctctattgagaaaatgcctccctaagacctggctggcaagcctgtagggcattttctttttttcttttttccttttaaagatttatttatttatttactgtatttgctgagtacactgtagctgtacagatggttgtacaagagccatcatgtggttgctgggaatttgaattcaggacctctgctcgctccagtctaaagatgtatttattattagatctaagtacactgtagctgtcttcagacacaccagaagaaggtgtcagatctcattatggagggttgtgagccaccatgtggttgctgggatttgaactcaggaccttcagaagaacagtcagtgctcttaaccgctgagccatctctcagaaaatgcccatggagggcattttcttaattaggattgatgtgggtggggcttcccccagggtggtggccctgtgttctttctataggaaagcaggttgcgtaagccatgaggagcaaaccagaaagcagcactcctgcacaacctatcagctctttgaattcctgtcctgacttcccttgatgatggactgtgatgtccaaagaaacccttccctcttcaagctggtttggtcgtcaagtttcaccactgcaatagtaacactaaaacaatatgtgcattataattatttatttgtgtttgcctataagcgttttgcctgcgtgtatgtatgttgtaccatgtacattcctggtgcccacagaggccagaagagggtgctgaatctcctggaattcgagttaaggatgattgtgccctgtaggtgctaggaattgaacctgggtcctttgcaagagcagccagtgcacttaaccactgagccattactccagcctctgtatgtgcatgcatttctctgtatatagttatacatttgaattgcttattgataattgattgcctattgtttggggaagtgttaggcaatagaaagaatctctcctaatcttctctcgtatatctaaaaatacagttagttatttttctcctgggtatagctcttagtcacattttctactatttgactttgaccttgggtgaattctcagccttaactatgcattataattgcccgggggaaattttagatctcgaatgcccagacccatgtgaggctattaatcagagctctagggactggcccaggcatcattacattttaaagctccctggggtatcagggcgtggggtgggggtggggtttctctatgtagccaaggttgatagtcacttcctggtatttaaagaagacaaaaaagacattaaaaaaaaacaaaacaaaactttctttagctgttgtaatcaagaaggaaattctgtgtaggtaatggttaggtaatagttatagaaatgcaaacaggatattgtcagttttaggggctgtgttcaggcattcttatatttcttagagacaaaattgaaccttatttatttatttatttatttatttatttggcccagcagagtcaataaaagaagcacagggaagcttttgtgacatgactgatatttctatgtttctagccagaagcactttcccatcacccaagtctgtgcacgacagcctttgaggccggccaaagcatccgggttccagtgattaacgtgttactcacagaagccaactttgtcagaggaaatgatctggccagatgggccccacgcagagagaggggccttccagtgttacgggctcctgctttcttaagaagctcttagctgataagctcaagggggatttctgttcagggctaaatgcaaacaccagggagcatttacaaaaataaattgatttgtgaaataaattgaaatgaatttgaaaatacggtgggaagtattgcattttgcaagtgggatagttttgcaggattctcactgcgatgttgtcgagaagagtacccttttcatgttacatgcaagggctgaaatatagctcagttggtatagtgcttacatatctctatgaaatcccccagaatgaaaagcccttagactggtatgctatcacatgcctgtagccctagcagttgggaaatggaggtgggagacccaaacgttcagtcaccttagtcgaccagtgagtttaaggccagccgagcaacaggaaactctgtcaggatcaaaaaataaaatagaggtctcaacctgatggcaccggatcatccaagcgtttagtaggccccatttcaaacacctcgtgcttgttaaaaataaataagtaaataaccttaaccagggtttagtcatgagtgttgtttggtgtatgcatagtgggcccaggcaggaacgacattgtcagttgggtctaaaccatcttgccttctcagcttcccttatactagagctacaaaggttcttcagtaagggacagtggctagactttagattttgttctatctattttttttttaaaaagatttaagttttattttataatttcattttctgtgtatgaatgtttgcctgcatgtgtgtatgtaccgtgtgcatgcagtgcccgtggaggcctgaagagggcatcagattctctagacttaggagttgtagatggttgtgagctgctatgttgactctgggaatagaacttgagtcctctgcaagagcagccaagctttcaacccctgagtcatctcttcagcccccctcctcccccctcccatcccttaggtttctgtctagtgcgtacaaccggatattgacagaaacagtcacactgatcatttttcaggtaattttctgtgaagacaactggaccattgcaattccagggctgactagtttagttgttcagcagtgtcctagctctggttggcgtcgctgggtttcccgatttcctgattctcttagcttttcttttgaccataggacacgactgtagccctagaaatcgtaacatcacgtggtaagaacacaaagcggggggtggggggtgggggggggagcagagtttttcgactttcccaggcgttcccagcaactccttcctcaggtttcaaacccacggccaaaaggttctagctctagttctggctgtttaagcctttgctcgcagtggggagtcattgtgcttggtgtggggggctaatacgctttgcctgcgaaggatcacattataaatgctttggactttgcgggtcatgtttggtttctgttgaatggcgtgctggttcgagttttgtcaatttgacacaaaattgagttacttgggtagaggaaaccggaactgaggaactgcctctgattggctgccaggcaagcctgtggaacattttcttgatcaatgtgtcatggcctagtccaatgtgtgtggtgtcactcatgggtgaatggttctgggtttagcacttgggaggcagaggcaggcagatttctgagttcgaggccagcctggtctacagagtgagttccaggacagccagggctacacggagaaaccctgtctcgaaaaaaaaaaaacaacaaaacaaacaaacaaacaaacaaaaaacaaacgaaagaaagaaagaaagaaagaaagaaagaaaggaaacaaaggtggctgagtaagccacaaagagcaagctgaaagtcagtaagcatcagtcttctatggcctctgtccctaggttcttgacttgagctcctgacctctatgatgaactgcaacctacatgccaaacgatgtctttctcccctaagttaccccctatcagcacaaggtgtgtatacagctatatgcctccagaagaaagtagccacattttatttcataaactggggcggtgggatgctaaccaatatctcttccccgtgatcaaaattgtgggttttattcaacgtttcgttttgagacagggtcttactatatactatatatctgtgaggccctgaactcacagatatccacttgcctctacttcctaaattctggggttaaaagtatcttcgatcatgtctgactacaaactgtgattaaaaacactttaaaaaattttttttaattacatgcatatgtctgagtttgtacatgtgagtacaggtgcccaaacagaagaggcatcagatcccttggagcttcccttctaggctgttttgagctgcccattgtgggtgctggcaaccaaatgagggtcctctgtaagagcattatgtgcgtttaaccactgagccatctctttagttccgacccgaatttgttaacagattgagtgagagagctactgatctgcctaacctaccgagctatatcaaggggaagccagagcagacaggctgctgggtctcttcctccgtccctgccccagagtccatgtccagacgtctggttgtatctctgaggcattttcagaaaggcttaaatgaggcgggaagatctgccctgagtgtgggctgggtcctccaaactataaacaggaggaagtgagctaagcaccagcattacctccgttgtctccgtcacactggagcctggtcagccttggtctactgccatcgagacgttcctaccaggatgggctgcaccttcaaaccatgagacaaaataaacccttcttgctttaagcttttctgtcaggcattttgttacagcaaggaggaaaagaactctgactgttcataagttgaataacagaaattaattagctgcgaaggaaagactatattggcttaacagtgatagttcaggcacaaagctggttaaaactcatcagggttactgaggctgtgacgactggggctatttttgccatcagaaagacatgatccacatctatataaatattaatttaagttaatatacaaccttgtggagtctcagtctaatcaatggtcagacaactggagaatcacctagtggctctatcccagagccaccttggagtcacttaggatttgttgaatgcacaggtctggccagagcccagtttctcattccagagtgtgttagctactttagctttcactgtgaccaaatctgatcttcctggtcagaagaacttaaggaggaagcgtgtgttttggctcacgtttgaggggccgcatcgtggtagagaaggcttaccagcagatcctgaggcagctggtcacgcacgccactgagtctccagccaggggcagagagatggacgtggtcccttagcaggctttttccttttctacttcttatccaggttcagatccatagactacgggatgacactgttcaaactgagagtggctctttctccttagtttatcctttctagaaagttctctgcagacatgtccagagacacactgcacttaccctctaggcaccatccctctgtgctctcctcccctctcctcccctttcctcccctccccttccctcccctccccttcctccctcgttttttcttttctcttatggccttgaatttctgattttcttgcctccccctccagagtgctagaattgcagtcatatactatcatgcccagttttatcctgggcatcttgtcttctttcctccctccttccttccttccttccttccttccttccttccttcctcctttcctcctttttttccttttcccccttccctccctccccaaacacaagtaaatgaataaatgtaataaaaacatagaaacaaaatttgcatccacaataaataccctagatgaagaagagaggagagagagagagagagagagagagagagagagagagaaagagagagagaagcaagcttctgcatttaaaacaaacaatcctgcagaccaatagcagacccttaggctttatctatctgtccatccgtctatctatctatctatctatctatcatctatctatctatctatcatctatctatctatctatctatctatctttctgacacagggtctcactgtgtagtgctggctggtctggagctcactacatagaccaggctagccttaaatactcagcatctgcttgcctttgcctcccaagtgctgggactaaaggcacaccccaccatgtctggccttaccttgaggttccagggcagatcttagctcttgagttacctgtgatttcctttaaagctttagaataaagaaacccaagttcaaaatttgcgttgactctgatgaagccgacaatattcactgtcctccgttggctccctattgctgttctaacaccccagttctcctgctggccctagttttcatctggctttccttcccacttattgcaagctccctaccctcccgttgccagttgctctagaaaaatgtagcatgtctgagtgtgggataaaaggaaacattttcattcacctgtatccattgttagaaacgtcagtttttgtgtgtggcccttttggatcaaggtcatcatgtgtcttgactgtttggattttcttttggggcacttatgtcttagtgtcttgagtctggcttctctgcacttctccaaaatgccttttgcagggctagacaggtgattaagtggttaagagctgctctttcagaggatccgtgttctgttctcatcaccaagggcatgtggttctcagctgcctgtaactctaactccagaggatttgacactctcttctgttctacaaagacatatgcacgtgcgcgcgcgcgcgcgcgcgcgcgcacacacacacacacacacacacacacactattcacataggaaaattaaacctagaaattaaaaaacaaaacaaaagcaaaataaaacaaaaaccccatcttttttttctgaagtccccagggcctctcttatttttaaaatcactgaccctttggagcactttgagggaaaccccgtagaggctggcagacttccgtgaaaagctctgtatttggttctgagctcctttgccggtctgcagtatgaacggttgtgtccgtgccagggaggagttggactttactctgtctttgtttgccaatctccaggcagcaaagtagccagtctctgaacattcttacattaaagacatgttgcacaaaattgaatttattaccattttatttttctgtttatcgttaatttatttttctttttaatcattaatcatttgggaatcatttagttcccaattcctttacttgcagaatcccctcagatgaattcgtgattttccttatgacatgtatgttctgtggttgattcagactggcatctccctttggtttgtaaggtgcacctagcttagtgtcctttcctgttgtggtgataaaatgccccggcaagagcagcttaaggaggaaagggtttgttcggctcacagtccaaggcaactgtcggtcctgtggggaagtcaacacagtaagaacttgaagccagtggttaaatctcatccacaatgtagagcagagagcaatatacgcatgcgcatgagcgcactcgcactcgcgcatgcgcacacgtacacgctcatgtgccccagctcattcatcgtcttcacttcatacaattctggatccccagctgcagccatggccatacccacaattaagatgagtcttccaatagcaataatcccttccagatgtgtctcctagttctaggttttgccaagttgacagtaccaaccaccacagtacctttatccagggtcactaaataagtaattattcctttgcaaacctgtaaagggaaagatggggaggtagcagagcagctaagagcaccggctgcttctctcggggacctggatttgattcctagcacccacgtggtggcggctcgcaactgtctccagctccagtctcagggagttcccctcttctggcctttgcaggcatggcctgcatgtggtacacagattcacatacaggccaaacacccaaacataaacaatgaaatgcaattgagaaaagaatctgtgaggtaaatccttaagctttgagaaagggaaaatatttagattgaaggaagtagaaaaagaatttaggatatcttttgagaaacctcttcagtcacagtcacctctctctctttccccccttctctccctcccctctctccttttctctcttcccctctctatctctcctaaccctctccctcccatgtcttccttccctctctccttcccctcttttcctcccctctctcctcctctctctccccttctcttctttctccttctcccctctccctcccctctcttccttccctcttccccttccttccttccttccttccttccttccttccttccttccttccttccttccccctgcttcccctttcctttcctgctccccccttcagtctttttacatattcagcaaacacatttcatttgtactccagggctctggtgattgtccaataaaacaaactgtgtcccttaactccaaagtgattccagcttagctcagagcagccatagcttcacaacaatatgacagatcactaatgacatagaagaaaattcaggtcccaatggtggagggaagggggtgaccaacatgaggtgagaggtgtcgggtccaaaggaaattctgatctccaagatccaaaaggcaatccaagtgtctagaaatgagctccacctggaccatgggaggctttgtagcagctagtgaaaagccagcattcctcaggagctagtgaagccaattctcttacctctgtcagaagtcacctgtggtgcctatcagaacatcaaaactcatgtgtaggctctctgggtaccataagcacctgttacacatttcagtctgtgatagcatcctagccctcctctcccctcccttaccctaactccatacagctcccaggcttccctcctctgagctcctcatccttctaataatcaagctattctctaggctcttcctggtttcagaacaccctctctattccccatcccttggctcattcgcagatcacccagccacccccagtctgccggccatgttcatgaggtctacttctttctgttctctcttctcgcttctttctctctctgctctggactcttccagatgcttctggctgccctttctttctcatatccagaacaaaacattcttataccatggagtggtcaagtcagtttatacagtggagaatgagtggggtcgtgtcagagaaggcacactattgaagcaaatgctgaaaggcatcctcatggtgccgacttgccggcagagctactgcaaggaagggacaggttcagagaagcgggataaacagatacaggtgagggggtgttgagagatgagggtgggcaaaagggatacccggtatggatggatgtaggtaactacgtctgtacgacattgaaggtgtcaatgggttggagacacataactcaaaaggtgagccgtcaataaaaaactcaggcaaaagcttagctaaaactccagagacttggattcagcagagaggaggcacttgaagtcagacacttactaggatggaatgaggggcacacacacacacacacacacacacacacacacacacacacagagagagagagagagagagggagagggagaggggagagacagagacagacagagagagcacttagaaactttggataggcgtcagggcaacctgtagaatagtgatgaaagagccacttagacaggtaggaggaagaagagtcttagatggatttaaaacagtccacgcccttttttgcctttgcatccgtagttgtgaagggagtcctattacctggttggttggctggttgattgactgaatcaagtactctaggcttagtttaaagtagtccaggatgaccctgatatccagtccccctgcctctgtctctctagagctgggaatcacagctgtgtctggggaatcttacacagggttcacgaatgttctaccaactgagcctcatgcctagcctggaaagtgtccctccacccccccccccccgccccgctgcccccaccccagggtttctctgtatagtactggctctcctggaaatcactctgtagactaggctggcctcaaacttagagaccccactggtgctgggttttaagtcgtgtcacttggctggaaagtcctaaaaggggacttaacttgcagttccttatttctttgcctcctggaacagcaccctttccgcaggatagatcttaaaacgattgaaaagataatgcttgaggcttggtctcatctttgttccctcatccctctgcccagatttcttcctgccaagttttacagcagattctgacctgttgggtcaatgatcctgacgggtggaggagaccatgctgggaccactgaatggcctccctttgtctggctgtgtgttttcctgactgtttatggtttctgacagggttgtttttgttctagggagagctggcttgagaaagccagctgctgagaaagccagtggggcttcacttccctctggggtgatctccaaggctcccccacagagttgtgagttagcatcccaaagccattccttatccactggggtcaactgaggccgctgcatccttcattttgatagaggaaacttcaggacttcaggagcctgacaggagacagggttccatttcaaccaccaatcacacattaagccccgccctcccctgggaggagtacgtgggggaggactgaaggtggagaggaagagagagtaaattctacttccctgacttctccttccttgttatcagtcacactgccctctttctcagagcgtacaatgtcagttttagcaagaagttatgcgtagacatttgaaaggaggcaatttggaaaaaaggtgaacggagggagggtttcagttcacatttgggatgaatcacacacacacacacacacacacacactggggattgtaacctgtaaacccgaagccgagtctccagctcaagcctggccacgctatgcatgaccctgggcaccccgctgaaaccttcagcagggcgactttgtatgcagccaccgcgggcattggcaagggaggctgggagaacttctaccttagtcagcagggagttgactgagttagcatctcctcttaccctgggataggactctggtcagatgatctgtgtggccaggatgttctggccgtgaagagaggcttggctagtctctgtgggttccagcacacacagttctcctgtggagtgacagggggaacgcagtgtgctcgtcggggctgaagcaattgtatttagctatccctcttctctgtaggatccttgcaaaggtggattcttccggtgaactcctaagaacttgagaatccagcctcagttcctgtctggatggcttttgtttgttgttggttttttgtttttgtccgcatttgtgacgctgcgcgctaagccttggcctcatttctgggtcagtctttcttcacgtattccaggcttcaccccacccccaccacccaatccggctttcctcaagcccctcccacctttccaacctcctgcgctgcattcctgcccctaagaagtcatgggtttgagatcacatatgtagcgtcttcaaagatttcttagcagttaggaatgcgtgttggaacatgtgcagatgaaatcacgctatgtctgggatttgcttcaaaggactctagtacaagtgtgtgcgtggggggtgtgcataaagcaagaacaaccaaggactgatgggtttttaatgggaatcttaggtgtggaagggttcgttacattgttctcctgtgggtttgagatttctcataatgactggctgatcaacaaaaacgttttctttattaaccaagctagaggtgatctctcccataggtgtttgaagcttctttgtcatagagtttttgtttgttttgtttctggttttgtttgtttgtttgtgtgtttgttttttgacatctgcttcctgttacagttgctgacaggcaagtatagcttagtcgttagatggccatgcatcctgacctgcctaggtcagtgttagaacactcctgtgccatgtcctacatttaccctagatatttaaccccacctccacccctttctgtcttttctttgtctcggattgtgtgtgtgtgtgtgagagagagacagacagagagagatacagaaagagatagatagatagagatagatacagagacagagagagaaagaagagagagagaggtctggtgtcctgctctaccattttctatcctagtctcttgagacagtgtctccattgaacacagaacaaggctgatagccactaacccacagcaatcctcctgcctccaccccacatggtgctggggtaatatatgcctgatcatgatcacacctgactgttttatggatgctagagatctgagctgagctcctccggtttgcattgctagggcccttcccacggagccagttacattaatagcagcagggtcatggggaattccactgtggacgccaagcatcccgtgtgggtacgacccaaagttcagcgaacagaatttctcttcagtgtgtggacacatccacaaagaagtaggcaaggacccgccagactttttcttgctttccaccaaccagcagcgtatggggtgcctgctggctgattaaatctgtgtggtcaaggttggctgagccatccacatcttagggagcaatatttgtcatcgcagctcctggagacacacagcgggcccccgagacggccagttgcaccagctgtttgggctgagttccaagaggagctctgtgaggctcggtgtttagaggctttagagtgacttaaaggatgtgaacgggtgccaagaaaaattattcagcttgtgttattttataatgttctgctgataactgacaggaagttccccccctcccccccgcatctttacttttaagcactcagagatgtgtgttccctgcaaattatatcttagtgcatctattaaaaatttatttttagagtaactctgaaaacatttgaactctataggttcccccatcctgttgactgctaaatatttaaatgccatgtaaccaatgcaattttttatatcatctttcctttacaaaagtgtgtttgttttgatgatgaggcacgtgactactttccttagtagtaaaatgtagagttgggctttttacccattacccgattctagaacatctccctctcagagagattctttttgtctccatttcctcctccataaactacatctagtggtagttgatcgtataattttcacgaagctcgaatgagttattgcctgggtattaggaatagagccttccattataagcctttcatcttggcttatttctcactttatatatattttatgtatatttttgtgagattacgtcgttattacttccagagaaaggaaatgttttgcctagtgttttcaaggcttctacagagctcatgattatgtttgttgagtggttgagtccccaaatgcatggatgatggatggatgttctagaggttagctgtgtggagtgaattagcttatggcctgcatatgtgagactgacagggtcatcttcctgtaggaaggctgctttttcctgtctgcatcagcatcactgctgagctaatgaaataatcacctcaatcataaagctgcatgcgcacactcgcaaacatgtgtgtgcatccatgtgtgcatatgtgaaggtcagaggttgatgtcatgacctctaccttagtttttgaatcagagtctctccctaacacggatctcactgatctggctagcctgactgctaggtgccttcctgtctccatctcctgggtgttgaggttagagatgtggttcctggctctttccatggatggtgagtgtctgaactcaggtcatatttacatagcaaacactccacccactgagctcgcttcctagctcacaaactaggcttttatcacagttgtcatagttcactgtctcccaggcccctgttccttccacacacgtgggctgggacggggcatgtaacatacgggctagtgttttattgttttttggtcaacttgacacgaactaggattgtttggaaagaaggaacttcagttgagaaaatgcctccatcggattggcaagtctgaggagggcattttcctgttgaatgactaatgtggcagcttccggccccctgtgagaggtgccacccagccatgggcagttggtcctgagagggccatcaaaggtacctgatgcgcaagccaataaactgtctttttcacagtgtctgcttcagtccccattgcaaggttcctgccttgagctcctgtcttgaccccgcttgttgtcggcctatacaccccaggtttccattggtcatgatgtttaacacagcgacaggaagctaactgggacgagactctattggactgtgtgtctatgtgaaaacatttagttttaaaccttccgattagcggttgaactctgatgcaccacctacttaggaaggtgggctctgctgtgcgatattctaaacacagcagggacacacatggtggtattttcatggattctaataaaagtagataactcaaagtgctgtcccttcctgcctttctggctcatttaaatgctgctcagacagttaaatcttcctatctacacactagacaagaaggggagaaatatgagatttgtttccatctctggtatatattgtcaggaagaggcttggcaatgctagtctgtgttgttttgatactttccagggagaaatcccgagtgggtattgcagctaacgcttaaaaccgatcggtcagctgtgaggatcccagccatgaggagctcatggacttgtgtttgttaggaagtgagctgtctggatccaggaaggattggcataacctggaggggagagtgggagaattgtgagctccgtggagctcgctgtgccattgtggtgggcttccttccattgtgtattgatctgcactcgaagagcagggttatgcctgctgtgttgactattggacaatagatttagatttaggtgttttgagcaggcaatctgaatatcctggaagctctgtactctaaaaacgttaacatgtgcgtttgtatcaaaataaatagtgatagcagactccaaacttttctcagtgtgttaaaccttttcattgaagcttagagccagagttggagactggtttgctgtgtctctccagctgcttggtccctctggctcaccctgcttctgtctgaattgtcattctccacttcgacagatttgcctatcttgtgatgttgttttctgagtttccttagaaagactttttctgaagaacttgatgttgtctctcccaatctctgctgttactaagtttaggttcctttcttgtctctatttgatctttgccagagtctctcaatctcttttccattggccagtcttgtcctccattttgacctccagtcttgccaactgaaggaacatggcatccacccatgggccaagcattctctttcaggactgagaataagatagtcaacgaatcactgcttgttcttccacaagacttatccatcagagcatctgcacagacacactgggcacagacccactgtacacaggcacactgtgcacagacccactgagcacagacacactgtgcacagacacactatggacagacacactatgcacagacacactgggcacagacacattgtacacagacacactgagcacagacacactgagcacagacacactgtgcacagactcactgagcacagacccactgtgcacagacacactctgcatagacacactatgcacagacaagctctgcacagacgtatgttgtacagacactctctgcacagccacactatgcacagccacactatgcacaaccacactatgcacagccacactatgcacagccacactatgcacagacacactatgcacagacacactaagcacagacacactatggacagacacactatgcacaacatactgtgcacagacacgctatgcacagacacgctatgcacatacacactgcacagacacactgtgcacagacacactgtgcacagacacactatgcacagacacacggcacagacacactgtgcacaacccactgtacacaggcacactgtgcacagacactgcacagacacactatgcacagacacactgcacagacacactgtgcacagacacacggcccagacacactgtgcatagcactgatgagtaagattctcgctgatgatgacatttagctgaagccagaaggatgaggaggggtgaggaaggaaagctgggaaggaacgagtgtttcaggtaaacagtttgctcagagttctagagacacacgtcactcagttcactggattaagggagctgaaactgagagaatgactaacaaacagagcaattaggagagacttgaaatggagtcagagaaaccgccgagaatgtcacaaagttctttatagcctggtgcaaggagggtatttcacttcaacctcagtgggaagtcagtgcaggaatggctttatccagtccccacttgtttattactcttgcactgtgtggtacagggtagaaggagatgaaagagaaggcgcagagaccaatgaaaaggatggtgtagaaatccaggaaaaagatgatggtgatggtgatgatgatggttgtggtgatgttgagtgcagtgttagcaagatagatggagaaaagtgggcgggtttaggctatcttttagagacaaatcggcgggatctcctattggattagacatgaagacgtaaaggagagaggatcttgagggtgattggtttgagtgagtatgtagagggtttcataggaagaaaagtacaaggggctggtaagatggctcactcagtgccgtgcttggtgtgaaagcagaggcttcagagtccctaggacccaactgagagccaggcgtggtggcacacatttctaacgtcctgtgagggagggacgtgaggatccaggggacttgctgtccagtcactccagatggtcagactcacaggatagaaagtgatcgagagagacagtacctgatgtcagcttttggcctccaaatgcacacacatgggcaagccaacctgcatacacatgtgtacagatgcgcgcgcgcgcgcacacacacacacacacacacacacacacacacacacacaaaagcagtagttgcatttggatgtatagactcgcctgagatctctgagaggaattgctgtgactccaggttggaggctttatttggagccaccctctaaagcaaatggcagcctgtaatggaccaggaagagaaggaagagcaagccacttagggggtgaagcgaagcacaccgcatcgccggagtctgagaaggagtggccaatgagctaggagcagacccaggtgcttgcagaacacactgttgttatgagctgcacgtggcacggccttcagggcgtttcttgttttgtgttgcttccttggctggttccctgttattaaattgacacaaccattcaggtccaaatcatacccaattatggttttggggctctgtagacttttgtatgaatctccccaggctaagacaaaggttttgtaccactgcgacctattgcaggttctctggggaaataggccccatgtcttcctgattgtaagatgcctatttgcagggttgcatatgtgtggagaggatgaaaagaagctttattgattgattgattgattgattgttttattttatttttttacttgtttgcttgcttgtttttgaaacaggaacttgctatgagcacaagctggcttcacacttggggtcctccagcttcagcctccctgggactgggatttcagttgtgtgccatccatcaggcctggctgatgaaaattgttgttttaatggaaaatacaagagcgtggttgtttcctggtagaggtacacgaggcaggaggaacttggtggtactagagagagttcaaggctctcaaacctttcctccagggagggtacagccatgagggaggggaagatatccagacatccttcccgggacaaggatggactaatgtggagcccagtggagggactgactttgcacctgaagaatgcgttcatgtttgtgtggaggatgaagacgtcctgatccaggacgagtgatgtgtgaggtcttactgcatgcctcttgtgtaagtctggagaaaggtcttcatctgaaggagaactgtcatgccggtccgtggggggtcacattcacctgtgctccgtgcctccatccgcttgcatctgttctcgtttcttggtgcaacatgcctggattttgcacatagagccgcacattacagaggaggcaccttgctttcgtttgagtttgtgctcctgacatgttctgaagtagaatgcttctctctaaccccacccccaccccctttcctactcctgcagctgtttagttcattttctccctgctgtgacacggtactgaggaggaggggttcagtccaccctgtgtgaagtctgggcagctgctcacgtcacacttggacttagcaaagccgagaaagatgaactctagtgatctgcttgccttgccccatttatttatttatttatttatttaatgtatgtgagcacactgtagctgtcttcagacacaccagaagagggcattggatcccatgacagatgtttgtgagccaccatggttgctgggaattgaactcaggacctctggaagagcagtcagtgctcttaacccactgagccgtctctccagccccctttgtcccctttaaaaaaaggatttattaataacaaaattacttgtatgtgtgtgtaggtataggaaggggctcgcggagggcagagagggcatcggctctcctggggctggggttacagatgggtggttgggagtcacctggatgctgggaatccaattccagcctatcacaagagtagtgccagctcttaacaacaactgaaccatctctgcagcctgcatttatcatttttgttcaatccaggacccatgggataatcctgaccaccccgagcatacgttaccccacctcagttacccagttccggagctccttatagacagcccagaagtctgttttcagagtgattctaaatcctaccacgttgaaaaacaaagattaactaccacacacccttactccctcacagactcttctaggaatcaggcgtgagatgccctcacctggatatttcttggcttctctcagagttctttacttacatcttgttcctagtgtaattgcttggctcatagctacaatttacagtaagatgtgtgtgccccgacagcagaggtcatctctctttcattttggtctctattctacctagcaccactcatatacatagtaagagctcaataaaattttagaaatataacaacgtcatagcagaccaattaattgacttggcatgtattaataagcttatatgtaggataggagaagaaggaaatctatttagcgcatgagaacggtcattccaacctttgctgacttttatgcctttgtcatgtcatggtcatcacgccgtgtttgatggatgccagcattcagaatgtcagttgttgagtctgatttctgaatcacttggagagccctgcaagtccttgaaagagtgtagtctcattttttgggtcaccagggcttcacacgaggcagaaccctcagagcaaagcgaaacagttagctacgtgattttgtatgtcttgaaaacgaccacggcctgtttctctggagactagcaggtcttcccgtctagaggggttctctgtttgctgacttgctttagaggggagcagcctgcagcggcctgggttttaatgtctttatctgtttcagtcagactgttattgaaatcagttgacttcagcttgtgtgaagccaatggcagagcattatctcactcctcaacttgtttcttcaaggtgccagacacatttcacacattgctaatgcatgcaattcacacatcactcatgcacatgtaactatgtaatagattacttaacaagcacgcataaatatgtctctgcataactggttttcgtagcatcttggactatattgcaagtagggaaacgttatagaaagacaatggatgtgtagagaagtgagtgacgataaaatgctaagggttaagagcactgtctggacaattgtgtatggttgtggtcctagaacattctatatctgtgtcaacaagcatggtttcaagttcgtgtgtgaaacaattttttactatgccaaaattgtcacagcagttttccgtgagttgtgaaatttgggtaattttaagttttctccttatgtttttcttgattttcttaatttttatcaattattattattaccaccaccatcaataccaccaccaccatcaccatcaccaacatcctagagatgattctgggatttgaacttagggccttactcatgatgggcaaacactcccaccattaagctatcctctagcccaattttctaaattttaagtaaatatttttccttgaagagttatgatttcttttactttctgaactcatttctgaagtctacatttatttttaaaagcaatattctattttattttattttttaaaagcatcagtggtataattattctttcttttcttcagtaggaaacctggagtcctagacgtgaaatggtttttagccaagaggactagagaataatagagcacatatttacaaataaatattggtcaggaaagagttgaagatgctttaaaatacagaatgtgatcatggctctagatattaattaagtaacaccccctttgtgtatgtgtatgtgtgtgagtgtgtgtgtatgtgtgtgtgtgtgtgtgtgtgtgtgtgtgtgtgtgtgtgtgtgttgtttgccccagcatgtgtgtaaagttcagaagataacttgtgggagtaaattctctccatttctccattccaacccttggcttctcgggatggatcccaggtcatcaggcgtggcagtaagcagccgccatccactgtcacccccgagtcagggcattcagaagatgtattcccctccccctgagtcacttatctgtctaattctccatctctggcagatgttccaatggtgtgtgagggggatggccctaattcctccatggtggaatagcagaaaggctttctgaatgcagcttaattctcaagactgaaatagatgattctgagtcggatttaaaaatctaaggcatgcaaatgagtgctcctgaagccttgactcagagcacgcatgtgaatgttgattgaatgtatccagagtggctactgctgaatgagaagccagagtgtcattagaaggacgagggtcaaggaacacatggcgtggtgtgttatggaagtttgtcataggatgcagtatgctagttcattgtaaattatttttcctgttgtgtatgatcttggataatgtcgagcccatacaaatcacagtgcaaatgagggagatcggagcagaacagagtactatagactctgtactgagtagggtgctgatcgtctggttgactagacctcaggagcacacagaagtggcaggtcgtcttgatatttactctttggcttctaagccacagatttgcttcctcttcctggcagctggtgtggctgtttcctttacccctgcagggtctctgactcagtacccccttctctttggaaggatgagagctgagaaggcagcatgtctaattgggaatttagtgccccttaatggcctcagaagcttgaaagtcagtgtctgggagccagcgcaaggactcaaacagagataaatatttgtgtttgggccaaggtcttagaagcaaaagaacaataaatgcgattgggagaacacttgaattttctgaattagggtttgagttcctggaaaatctcttgtgctctataaactgaagatagaaggctatgttaaattggaaggagggtggctctaaactctccctgggtcacagtgtgctccgagacagtgacaatgctggaggccggagggaaatttttaacatctaagttcggaagttttatgttgtgctgtccgctctggactgtgggttaattcagtagctagtgcgagcttcgctgttggtgatgctccgggactcccctcctttccattagaaatccctgcagtggtgctgatggggagggataagagcatcaattagccatcaaaggatggaccatgtccttttcttcatagactggttaagatgtgagtatgcgggtggccctctcagggcggttgaagtaagggttcctcattcttaaaaagaagtgtatgtggcatcgtggacgtgataatgagagaaggctaaatagaaatcaaaacacaaacccacaaacaccctgtgaggtgaattggggtggtgtgaaggatcgtcattgtctcagagcacaccgtgacccagggagagtttagagccaccctcatccagtttaacatattcctctatcttcagtttatagagcacaagaggttttccaggaactcagactttacttcagaaaatgcaagtttttctcccaatctcatttagtgcccttttgcttctaagtgtgaactcctgggttctaaagtgtgcatggttgtctgtatgtttgtgttcctggtagctggacgtttattcataggtgtgtatgtttgtgtatggttactctactcactgctgtgacctgacaagaggctccctaaggaaggtagtttttattttggcctgcatttctggtgacagggccctttgtaacttgatgacaggcagcaggcatagataacagcctcttagccagaacttccttatgacttagtggagcaggaaggagagagagagagagagagagagagagagagagagaggggatctgcttaactttctccgttttccctttttcattcagtctgggaacccagcccagcccacattcaagctgagtctctcttaaatctctctggagataccttggaagagacccccaaaggtgtatctcccagatgattacaaatttaacccaatgagatgaaatatcatgctatgcctatgtagtcatgtgttcctgagcccagattcataaaagggctaagaagaaaggacaccccagaaacaatgaggacagctgccatccagatcttgacaccttttttctgtcgcagggatctagctttcgtgggaaaatgccagagtagggtcacggacgtgggaatggtaggctgccattctcctgagccagttcttgatcagagcctcgactggagtacttcactctttgattcagttggatgctttggaatgacagacatcatctataagattacagatagcccttgacacacgatggcttgactagtgatttgatttaactaaggatggtgtgaaaaaccatagatattcactagaaatagtactttgagttttcaatttccatctttccctcagccatcattgatacttgatactctgtgtgtatgtatgtatgcatatatgtacatgtatgtgtacttgttcccgtgtctgagcacctacaagtgtgtgtgtgtgtatgtgtgtgtgtgtgtgtgtgtgtgtgtgtgtgaagtgggtaggaggtcaacatcaattgactttctcaattgctctccaccccatgacttgagcacaggctctttcactgaacttggagcttattgcttcagctagactagatgtctatccagcgccaagggtgctccccccaccccttgccagggctgggttataggcacacattaataggactgattttcttttatatgggtgctggtgactgaccttcaggtcctcatgcttgtgtgacaagcactttaccagtggagccacgcccccagcctcactatatgacttcctcatgatcgggagcatcagcagccgctactctagccgtagagtgcactagtaagctgtaaggtatggtaggttaggtgtattcaaggtgttttgtgatttatggtagtttccattcgtcgtcttcttcctagtagtagtatctacagtgggggcagccacacactcattgatgacccgcctttgtatgtcaatctcctggtctgaaggagataaagcaccatgaagtggattaggtaccagtgtgctcagagtggtgcttaaaggggtaccatgggccgaggcagtccaggtacacttgtatccgacataggtgtcaattgtagtcacgtgaattgctgtctcctctcctgaatggagatagcaccgtgagcgactttccacccaagagccagctaatcttcttgttctaagcgtctgggttatctgctattgcttgatcattgataagagggcttcgtagcgccatatgtatgcccagcctctatccctaacccaccattgtaggtttgttgtgagagccctgggaaattgaggcaaggaagttggctgatatccacggtgggctagctttttgtttgtttgtatttccaccaattaccgtggaatctgctgatccatacggcctgagtaacaaggcatatcgcaccagcacccagactgctactcagttcacggttctgtcatccgctccctccagagctccaaatgtcaattgtgttccaagaagtgggagggataatgggttgaaagaagaagggaaagtcagtgcagcggtcacagctaggggcaagactttgttcttatcagatccaggagcctgttgatgtatcttatagatctgtgtgtccagaagactaacagggagctagagagatggctcagtgggttaaaagcactgactgctcttccagaggtcctgagttcaattcccagcaaccacatggtggctcacaaccatctgtaatgggatctgatgccctcttctggtgtgtctgaagacagctacagtgtactcatataaaaagaataaataaataaaatctaaattaaaaacctcagccccccaaatatcccccccccaaagactagccggactgttcatcggtcctgtctcttatttttcattgattgcaggggcccctgcacacgtcagcagtcaagacatgcatgtagcaggtcctgctgttgttttcaggggtcggggaccttgtagaacagggatctagagacagaggtggtactcgctgtagccagaggtgaggacttgagtcgcactcttatggaagctgatcaatacctctacttgactggacggctccctggggttctaaatgagcaggcaaacagatagacatcaggaaagctgcccagactatatccaggcccatgctacacttcacatagcccagtgagggaagtgcgggtcaggacccaggcacgcctggctcccttctgatctcattggaatattgtagcttatttacttgctcattctaaagttcagtgtctcatctgcacagtgggaataacaactcattatgcaaccgagaggttagcacagggcgtatctgcacaggccttgcgttgggccatgtattaagggtactgactaatccccagcttgtgcacagtagcaaatgaatacacagataactctgtagtcttgtaagagggagggagagcagaggagataagggatggcgggcagtttgtgagaatatgataatgctaaaatgctagaagtcagtcagtcagtctgtcagtctgtgtgtctgtctctgtctctgtctctctctgtctctctgtaagtctacctctgcctctctgtctctgcctccctgtctgtctgtctctgtgcgtgtgtgcgtgtgtgtgtgtgtgtgtgtgtgtgtgtatgtgtgttgcagaggaaaaaaactaagatattccaggacattacaggttgtagatgcagcctggaccaaaggaatgcagcccagactaaagttaggtgtcgtggttggttggtgctactggccagcttgaggtagaattccttgggaaggctttagatgagatgggcctatgagtgtgtttgggggattgtcttgagtgccttaataggtccaggaagactgactgaaaggaggcagcagcagtccttggtagtgtccctctgggccgtgtgagagtcgagaaagctggctgagctctaagcatgcatgcattcatgtctctctgcccctaactgtgaacacgatatgatcgatatgatcggctgtctcatgcttctcctgctgtggcttccccatggtgatagactttgacgcggaaatgggaagcagcaccacccggtctcctcagagttctttgttgtcagggtattttatcatagcaatcgaaatgaaagcaagacaagtgtgtttggggaagagggcttccatctaactgcctcttggttattccttgtgtgtgtgtgtgtgtgtgtgtgttgtgtgtgtgtggtgtctgtattatatttttcactgttcaaggaagggaaagatttgctctagctcacaggttcctggtagggaaggtctggcactaggactctggatctgcatagacaaatcagcagagagcttgagtcagtagtggggctagtctaaaatcccagatgccacccgtgtgttgctacctcacccaaatagtccccatttcccaagattctacaacattccaaaagagcgccagtagctggaaacccctgaaagtggaattattgatggttgggggccactaggagcaagtgttcttaaccactgatttcatctctctaacttccccttcccccaccccgtgactgcatgaggagagtgtaaattataggcccggggtgggggcagtttgcagggaagtgtgggcacattttgcagagaagagacctggaattcagtctttcaatctcaagggcttattcacccttgtagtccatttaggccacgagggaagttggctactccatgtgtcctcccagaagcctctgggaacatcacctgaacattctataaattaatccaaacgttttaggagagatatctgtgggtaaggcatcagagcactatatgtcgttttatatttcacaaccccgctcactgctaaaaatatattaaaaatatatatcatattatatatataatatgtcatataatatatataatagtttagctatctgggggctttttattaaaggacttagtgagtgagtgtccttctgggattatatatctctctcctcagctctttcatgtccatttgcttttatttccagcttgtgaagccccatgggcctgacacctactatccatggctgcctctaaggctcttctcttaccttacctgtttgccccttggcacatgtgaagaacagggactcttctcagagtctcaacccctggggtggtattggcttcagttccttccttccttcgttccttcgttccttcgttcgttcgttcgttcattcgttccttccttccttcgttccttccttccttccttccttccttcctgtctcttctcttctctgtctcctcccctcgcacccctcccctcccctnnnnnnnnnnnnnnnnnnnnnnnnnnnnnnnnnnnnnnnnnnnnnnnnnnnnnnnnnnnnnnnnnnnnnnnnnnnnnnnnnnnnnnnnnnnnnnnnnnnnnnnnnnnnnnnntcctttcttccttccttccttccttccttccttccttccttccttccttccttccttccttccttcgtcccttccttccttccttccttccttccttccttccttccttccttccttccttcctgtctctgtctctgtctctgtctcgtcccctcgcacccctccgctcccctcccctcccctcctcccccctcttgttttttgcttgtttgttgttattgtttagcaaagcctctggtccaacatggtaacaaagacgaaacaatgtatgcatgttcggagactgacttttgccagggaagaaggaagctgtcttggcaatgctcagcagagttgctgggtcttctcttttctcttccctcccctcccttccccttcccttctgctcccttctcctccctccttctttcccacctccccctcctctctcttctgactatctgtctctctctgtttttctgtttctctctctctctctctctctctctctctctctctctctctctaacccctacatagcttttctttacatagagaaaacataggtttttggttttttggtttttgtttttcgtagctctagctgtcctgtgtctcgctacatagaccaggttggcctccaaatcacagagatccatagccttaaaggattaaaagtgtggctactatgcctggcttgtaaaattccaatttgctcttctttcttttggatcttgcaatgagaagccgtaggaagagttggggatatagaaatgggcaggtgcgaaagcttatacttcctgagcactcaatgagtgaaatgcttgttggggaaaaaaaaaaaggatcaaaacaattggaactgggaggttatagaaaaaagttaattaaaaaacaatgtgcgtttttgggccagaaagatagctctgtcacttgagtatttgccttgtaagcgtgatggtctaagtttgaatcccaagactaatgtttaataaaaaagatgacatgctagtgtgcttctgatccaagtgatggggaggcagagaggtgatccctggagcttctgggccagctaatctagcctgattggtgagcaccaggccaggtgaatagagcccgaggaataatggctggccaggattggtgtcttgcttctacacacatgcacacacatgtacctgcacactagtgaacatgcaaatgatctacacacacacacacacacacacacacacacacacagaggcacacatatagacagacagagacacacacaattgatctttggttttgaccactattttttatttttattacttctttgagacagtaatacagatattggtcacgttcatctttatgagccatcctaattcctttctgttccattcatctccctactgaccaaacattatatccctttgttttcttggtttttttttttctttttgaatattttctttatttacatttcaattgtttccccctttccaggtctcctcttcgggaaccccctattccatccccctctctccctgcctctatgagggtgctcccgtacccacccatctactcccatatttcctccctggcattcccctacactggggcattgaacacccttaggccccagggcctctcctcccactgacgtccaacaaggccatcctctgccacatatgcagaccagagccatgggtccctccatgtgtaggggcttacagtttagacaggagttcttcaaatgtgtcccatgacctttgagattctgggacagtctttgggccgggaatggtttctgagtcacttatttccaggtatcctggggctcgggtgtggcacagaggaggcttgtaggagaactgaggacgtcttagggcccagctgctctctgtgctagcagcatggccgcccattcgatttttctcctctgcctctcatgtagcacctcctgcttcctcgtaggaggactgggtaccatgtcacatgaaaactctttagctggcccatctgcccatttcagacattttgtagtatcatgcctttccttcttgtaaagcaattactttcccagagcctacccttctgctgaacatttgctcatgccctattcattagcacatgaccacgtcatatgtgtgtgtgtgtgtgtgtgtgtgtgtgtgtgtgtgtgtgtgtgtgtatgtgtatgtgtgtatgcatgcattcacattgtgtgcaggtgctgatgtacatgaaggccagaaatcaaaatcaggtgtattcctctatctttttgaaatgcagtctcccaatgaatgggaaactcacccatttttctatcccagatggccaggtagccccagaaatcctcctgtctctgcttcctgatgcttacagatgcttgctacactgcatctgcatcttacagatgcttgctgcactgtatctgcatcttacagatgcttgctgcactgtatctgcatcttacagatgcttgctgcactgtatctgcatcttacagatgcttgctgcactgtatctgcatcttacagatgcttgctgcactgtatctgcatcttgcagatgcttgctacactgtatctgcatcttacagatgcttgctgcactgtatctgcatcttgcagatgcttgctgcgctgtatctgcatcttacagatgcttgctgcactgtatctgcatcttacagatgcttgctgcactgtatctgcatcttacagatgcttgctgcactgtatctgcatcttacagatgcttgctgcactgtatctgcatcttacagatgcttgctgcactgtatctgcatcttacagatgcttgctgcactgtatctgcatcttacagatgcttgctgcactgtatctgcatcttacagatgcttgctgcactgtatctgcatcttacagatgcttgctgcactgtatctgcatcttacagatgcttgctgcactgtatatgtacctggcttttatgcaggtgcaggaactgaatttgattgtttcccaagctctttactgactgggagatactcctgactcagccaattttttttttttttaatttctgatttttaaaacttcatttatatatcctatttttaatttcacttaatagtaagttttattataacatttcactcatatatataatatgctttgactatacccatcttcctttattcccccccccccccaactgatagtctccttctacttcacgtcattttaattttagattatgcacaggacaggaaacatggtgtttgtctgagtctggtctgttccatgtaacattatctccaggtctgtccattttcctgaaaatgacgtcacttcattctttaggattgagtaatactcttctgtgtatatttaccacattttcactatccatcatctgtggatgatggatttatatatatataaatgcatatatgtatacaagcacacatatatattcatgatatatcatatatatgatgcttccattaaatataaatgtttctaatattctatattatatttatatatgtatatttatacaattatatatatacagtaatatatataaaactataaagtaacacacgtacaaaaaagatcaagcatctagactctctttatatctttatgttttttcttcaccactatgttctctgatttcttgtatgtaatttgtggtttcgccaggtctgcagattttccccttcaatgaagcctcagtgaaggtactcacaaagagcctcgtgttgaacttaaatcgagaatgtgtctcatctgttctcagttgacgtatagatgagggatgaaggaaccaccctgaaaaagtcatttttcagttgttttctggggcactaacctggagtccccaaaccatggtgggtgctggaaacagtgagaacattaattgatgaaagggtgtttttgtttttgtttgtttgtttttaggaatggggaaacttcttagggagaattaggcaatcttcctgcttacaaatgcaccaagagggtggcagggtcactgaaatcccttttgtttagtctgtttattttattctgagtgtccaccataaagccagatgtgatagtgaccctgggtgtttagtctgttctgggacaattgactccatgaacaggaacccagaaggtccaggtagatggagattgctgcaggataaggcaatcatcacatccattaagagaccagagccccttgggactctgagctcacaggatacacaggacacagaaacatccccaagactcagcaacttgcaatcaccaatcacagtcccggctttcaaatattcacctactttcctgctaaagtaatttatgttggacagaccggcaggcttaccaacatcatcagaacaccctcagggagagggtgcggagtccagtagaaatgccatagggctggctgctcaagtgcagtcatccttgtgaccttatctgtgaagttgataaagtactcctctgaaataccagagcatcaatttttgagccagttacctggttgattgaccaaatgttttccatccttgccttggggctgagggaggatgggatgggacatactaaagtccagaaaggttaaaatatcttgagcatagcccatgggagtagatggcttaattttttgtactgagtctagagccttttggcagaccttggtcgtgtcctccagctcctggcaaacatctttatgacctgcacgtagtatctggagaagccatgtgagagaagcagaaaatccgaaccgtgtccttctccacaacagttttctgtggatcctggggtttatatatagcacagacacagctcagccacaagcctcccacaagtagccacgtgatgaagaacaatttcagatgaaacactaaatgcaattgtgttatatgggaaagccaattttctgtatgtgtagaagctctatgtacctggaccgagtccttgaaatagtagaaataacccctcatggagttgctgtgatccttaaataagtcatggggactactgaagacatcatgttacatataataaattcctaagaaattcaaacgtgtttaaccacgttttttcatgaacagccatttgttcacaacacagtaccaaccacagaacagcagtgtagcttgcttggtaattcagcttttaattttccagcttctgtgtatccagtgtcagtacaaatgttgcttagctgccttcaatctgctgtagtgggtgctgctagtcccactgtaaggatgaagctctcaagttctcagagctaatgagtccttttctattggcccctcctaagcccaccccttttaaaaacagggtcttattaagctgtattccaatttactgcatataacaacttttttgaagatttaaaaatcattgcccccccccccaacataaatctggagtacctccctcaaaccttcatcctgctctctaatagtaagaatgtctagtttcccattagtaacgtcagtgatagtcaatacattaaaaatgtgcagtgtagtgttaagagatgtctcactggctaagagcactaactgctcatttggaggacctggattcagttctcagaccacacatagtggctcacaaatatctgtaagtctagttctaggggtgctgatgccctcttctgacctctgcaggaaccaggcattcaggcaaaactctcatacaccgaagataaaaaaacaaaacaaaacaaaagacaaaaaactcacaatgtaaaggagatcttataagactattatatccaggaataattaaataaaccatctgcatatatatatattgtacatatatttgtatgtgcatatatatgtttaaaaatatacatatgcttttgtatgtgcatatatatttaaaattgaaaaaataaaatttgtatacatcattattttgtgtcagtgtatgcctgtgcattgtgaatgcagtgcccttgaaggctagaggtgggcatgttataacccttggaactggagttacagatggttctgagtcaccatgtggctgctgggaaccaaacatggagagctctttaggaataaaccatctctctagcccttagatttttgactagacactgtaaccatattggggataatctttaggtagcactacgtatgagacactaggggagcatatatgaacctatctatatctttcacttgtccctgtgatcatatagagagtagaggactgttcttacagtgtgcttttttgcttgtgttcagtcttggagatgaactggtttacatgtctgaaggtgactacccaaaacagtttctagacttattgcccaagactagaggacgtgacttcttctgacacactgagctatgacgttgcctgaagtgatatttgttcattacagtgatcatgactcattcaggagtacagactgcaggcttctgtttttctataggactgagtaatgttcccattaaggcctacatgagactctgaaatgctattgaaatattagtttactagtacaaagcgaaccacgtcgaaaataactaatttgcttttatagattagattggctttctctttccagagaatctcatagttcagatctgtggctttccaggagtccttcctgtgaagttgggcatcttggagccctaagaaaacatgccaccattaagtgaagcaggaagccagggaaatccatagctgaataaaagataaactgttgtggtctgttaccaggatgcattttgaaaaccagactcttaccaatgcctggtctccctatgcagatcatgacagggcaaaggattagtttgcgtttgtttgtttgtttgtttgtttgtttgtttgttttagctggagagtgtgagttaggattgaaaggtactgccaaattttcttactactatttctttaccgtcttgtcagggagcatgagatattacagactgtaccatagacccacagaaagggctggatgtcatcttatggttttcctgcccatttatccaatttatttaataaatcccccccccccctgctttgccccagcacaggctaagtgctctgggcattgaggtactgacctactcatggaggaagaggaaagcctgctcctgccttagggcatggagaccacacaggggagggcaatttcattgttatttacattttgatacatttcagagacactcaaaagtaaggtactctaatgagccacgcaatttcattgttataaacattttgatacacttcagacacacttaaaagtaacatactctaatgagccttcatcaccaagcttcaacagttaccagctcatggccactcctttttcacttttatctccagtttgcctgtctctccggtcgtccacattattttgaagcaattctttgaagcgcaccattgtaagcatttcagggtttatatctaaaaaacaaaacaaaacaaaacaaaacaaacaacataaaaatgaacctgtctaaaactctttcaaaattcagggtgcattttgaaaagataaccacatccctaaatttcctcccaatctgtttccgtattttcctttcagagcgctgtttttcaacactttcttttgataatggctcgtgaacggagtagcccctaaataaggaagatgtagccatgcaatgggggttccccacatggctcctgccagcctcctcccttcgcactgactctagaccgcaagtagagagagccttgccgggatttatatttgggctgtttcgagagagcatgtggtcagcgccaaaatgctaacaagacagaaaatactttaaacgcaccaagtctttaaaaaaaagtgccccagcgcagggaactgtaagagcagcattctgggcgctcacatatcgacgtactctctgacgggaccatgattccctgtctacctggctaccttctttcccctccgttttcttgtttccttgtctgctttgttcatcgttctctactgtcagttctttccatttccctgtagcacaccgttgagcttcttttgcccaccatgtgtctgatgctcctccagtatttttccatttagtacttctgagttgaaactcatggtattaattgcatgcttgtttatgggacacaatatggtgatggtgatgatgtttgaggatgctgctgctgctggtggtgatgatgatagtgatggtgttgatgatgatggtaagagtaataatggtgctatggtagtaatggagattgtggtggtagtagtgatgatgatcgatggtctgtcttgacacccagcttctgaataacgacacagagacttatatttatttatgactgcttaggctttatagtttaggcttgctctcaactagcttgtgtagattaataactcgcttatactaatccacattccacacatggccagttacctctctttcttcccggtacatccgacttcctccagttctggctggtgaatctcccgatgcctgctctttcccagagttcctatctctgcctggatgtcccacctttccccttctctcctgctataggccatcagatctttattaaaccaaccagaagctgacggggaagaatgtttacaaagtatggagcaggtgttgagcaactagaatagcaataccaaagtcgggacagtacttaacacactctgctggtacagaaatcatgtgaataaagcaaagacaacctttatacagtgcacaagattatcccagcgatggtggggggtggtgaagatgcttatcagtcagggttctctagaggagaagaactcacagaataaatataccttacaggggttctagattagattggtttacaggatatgggctaggtagtctagctggatgatgcatgagaggatgagaatcgggtagccgctctgtccattggggcaagcgcctctgtagtacctggattgcagtgatggtctggaggactcctggagaactttggtccttcgtttcacccaagaagctgggttctggtgtcagctaaggaattgataagggatgcttcttttagttgattagaaatccagccaagaggacagctgagattcaccatcacaacagtgagctctcatgtacccctaagtcagttattaaaggctacctacccatagctccactttctctgtgaggcattttttttttctctgtgtctgacttccctgctctctccttcagagtgcaacgtaagttcacagctattgtaatattggaatttccaatctgctgactcctgcaaagcagaatttgtatagtaatgaattttacaccttgttatgtctactttagtgaattattgccagtttcagttcagcgactcagttagcacagtgaggaacttaactttgaatttagttgtttaaaaaagatttattttattatttttgattgtaattagcgtgcctttgggtaggtacgtgcataagagggcagtgcccaaggagtccagaagagggtattatctgttctggagaaggagttataggcagctatgagctggctgatatgggtgctaggaactggattctctaggtttcttttaatctctccctccctccctccctctctccctctctccctcttcccagacaggatttctctgtgtaggcctggcttttctgactcacactgttgaccagcctggcctcaaactcagagattctcctgcttctgcctccttggtgctggccctaaaggtgcacaccaccactgcctggctacgaaccttggtcttctagaagagccatgtgtgctcttaaccacctgaatcatctctccagcctccaggaatttaatttttcaactcttacaacttacttggttgtaggggaagtatcaggtgcctaggaggacaggggttttagcatttattaggtgagaaatggtgagattgaaatactttatctagacttactctatgctgggcaagtggttctcgaccctggctggaatctaagttactgtggagcttaaaatgtgtgtttttgtgtgtatgacagagaaagatagagaatatgtgaatgtgtgtgagagaaatagaaactgtgtgtgtttgtgtgtgtgtgtgtgtgtgtgtgtgtgtgtgagagagagagagagagagagagagttagttttgaggtcacactcttagaaatcctgagtctatagatttggacttgctcccattgttggtgggcacactgactgtggggttcacgttgtatgagctgttgagaaatgtaattttagcacaagtcacacaagggaaggagctccgaggatgtcgttggaagtcacaaggtgcctatgagaacacattctgctaacgttatatttttaaaaaaaaatttttttttaaagtatagatatggaaaggagggagggaaatatgaaaagaaaagaaaaagccaaatgaagaggactcatctttaagattgtagaaggggaggggagggtgagggaggggctacgtgaggcggggactaggaggagaggagggctgttatctatccggatgtaaagtgaataaataaataaattaatggaggggaaaaaagagaccatatttcaaatcctagttgtgatggattgtggtaactgtcaacatagcatgattcagagtctcctgggaaatggaccctgggtattctattaagggactatcttgattccattatatggctgtaggaagaaccattccaattgtggatcaggctatcaactgggcaagagaacctgtattgcataaaacagagacagtgagcaagcaatagcttacatgtctttgtggctctcttctaactgctacaatgtggccagctgcttcaagctcctgctgtccggacttccccattactgtggattgtactttgaactgtgagctgatacaaggcctttctcttaatttgctggtgttcagctctgctatcacagcaacaggaaaataaaccaagacaccagttctgctactcagttgcagtgtgatcctaaagaaagttccaggaaacaaactggagctgatagacagccacaccacgccactcacagactcaactgacacagtgtatttaaagaactctgtcagtgcctgtggagactgggtgctcaaaggacccttcccttccccctcctctgcctctcccttatcattttcatcttccttcactcctcttttcctcccttcttctctccttccttttcttacctcctttctttccttcctccccctcccttccttccctccttcctccttttctatcttctctctctctcctccttttctttcttccctttctcttacctctctcccctccctcccacttccctccctacctccctcccttccttctttcttccccctcccatgcctctctgtggtttgctctgttcaaacagccacaaaaaggataatgaccattcagtaaacagatatttatgatgaagggcactggacagaatttttgctgctgctgtggaacttacgctcttgaggggaagacagacagacagtaagtcagtaataggcaaacgtgaacttaaaagcacggaggtaatacgttgaggacagcgaatgaatggtagttgcgagacctatttcacagaactggggaagggcttgggaggttctgtggggtttccatggatgtgctgaattcagaaggttgaatctgctagcacctggagctctccctgtagaggggaccatgtagggacaggcgagctgctaagagattcattctgccttcttaattaacatgattctaagttttcaaacgagctttccaatttttcttctctaaactttgtgtaatctcccacccacctgagattttgccctccgtgccgagacttagtgatgtgcaacagcatgtggtttgtggagttgtgttggttggggctccttgtcctcttcctagtggcttgtgtaaaggcagctttacctctgcaccccctgcctcctctgggctccgttagccgatttgcatatgatccttgtagtttaatggcacctaatgacacttttctgtgagctttgttgccagatacacttggaacaggaggccagatgcaagttgttgggagagggcagccaagggctccaggtccccaggaacttggctagaagtcccattcacaccaggaaacacgatagaaaaagtaaacttggcaccggtgacctgcagttcttcctcttgggaagccatgacagtagtcgcagacccccagagtcatgcttgccagccttcagtggcactgacaaattctgagacacccgattatctcttggtggcaccttctgccagccgcgtggggctgcatgctgtttgggttggcaccagagcatagccctgtattttatgtaatgagacacatcagaaaaggcctttgtgcttacccccaccgagcgggcactgggcggggacctcatttgtaccccatcattttatgtacactcgatgctaggatgcttctatgtggcctagtaattttttttttctttctaaaaatttctttctcatcccagtactattttgcctctgaatccgcatgacctggctttggtttaaagatgaatgtagccaaggtgtgtgctgggagggtactgttctccgagacactcccccccccccaaacatgcacgcacacgtacatacgcataaacacacatttgcgtgcgcatgctgatgaaacactgtgtgtgtatgtgtggtgtgtgtgagtgnnnnnnnnnnnnnnnnnnnnnnnnnnnnnnnnnnnnnnnnnnnnnnnnnnnnnnnnnnnnnnccctctgagaatccctgtattctcttctcacttaaggtaaagcccattttctgactttaaacaagttctggcttggattatcaaaggaaaggtcgattaacgttcttggacacttaactttgctattcatctctctccttcccagttcgtcatcgtgttcccccccccccccccctgcagctccagtgttaaatgtgagcacgaggtgttggcagcctccttgagggaacagattgccctgaaataaacacagctggaaagcgaccacctattgtttttctttctgttaggaaatgaaagagctatttatcaaaagcactgggctcccatttataactgctgggctggttaatgatcaatgccacccctgggtgtctgaatgggcatgctaaccttctgcctccctgagtggcttccactgccctggaacaatgaactctgtggagttttgctaccgcacaagagcaggaggcggagcctgcttttttttttttttttttgcctccagctgaagcgtgccggctttggagcttagcaaaggatggcttctgctgggattccttctgccagctttgcagtttgcagctttgcaggcctcctggaagccaacgaagcttctggagatggtcaagtaagttctggaaggtggtagagatgtgtgtggttttcaagtgccttggtttacatctttaagaaaagaggacacttttctaagtgatgttcggctgctctgtctcctgaggtttgttctggttgctgtcaggggttgaatggtttgaaaatttatactcgtgaaaactttgaacactgtgaaaatgtctaacttatagagagtgggatgtcagaggagactagaggctgcaaattccggggcagagtggtgtgcgctgctgggtgtacttgggaagttgggggagaaccacaggcaggctgtgttattgttttggtcatctgctctgttttgggtttctgtccccaaagatctctccccacccccttctcttccttcattgctcacttgcttcctcccggtctttctgtctttgaatggatgtgttgataatttattgccttatggtgtcataactggttgctgcttaagcatccctcctggtgtattaaactttttaaatggtgattttcctttaaatttaaactgatcattcctcacacctgacatgtaggacccaagttagcagtgaggacgaataacttctgtctaagatttcctccaatgaccactgggagcccttactccaggcaggctatatttacttttgtttcatttgggaggaccctaaggtggtggtatttgctgtgatatttgctgtgcttttctgattacctctttgcttgtgtcgctagccatttgtcccgatttgaaggagggcatctggttcctccctggagtgactcctctccatttgcatctcctcgtcttgtggccgagactcttggatggggctcctcagagttaagccatctgtgtatctgggatctcagcgtcagacatagccacccagcagtacagtgaaaagttctatactttgtcagcccacattgtatagggctgattaacttgataaatatgtgctgagtggcctctgagattcagggggagggagaaatgatgtacactgactgattcttctagatcgcttgaaagaaatgaagagatagttgagaaaagccgtttactaaaagatgctccccaaaggctttctttgtgctgattactgactaccattgcctctatactgcctgctgagttgatctaggtactgaatttttgaaagaatacttagaaaaagctcaattatactcggtcttagggttctaataacataacccgtcttagtcatggatttcttacttttttttttttttaaataagacacatagattgcttctctatatgatcatactggaagggttctttggctcaatatttttcacatgtcctgtctggtttgattcttacatttagtttagagaagtaaatattgatgttattctggattttacaaccatggagcctgagagttaaaagccagttctttgttaaacgcactctctgctcttctagaggacctgtgttctattctgaacatccaggaggtggcttccaaaagtctgtagctccaattccagggggaatacaatgaatgccttctggcctcctcagacatggcatgcatgtggcacccagacatacacgcaggcaaagcactcacaccggtaaaattaaaaaaggaatcttctgaaaaaggacggtctgtaggtcatttggtcagagaaataacctggtgatttttaaactcacaattccgtgttcctgcatctcactcctctgaccgcttctatacatttgccctgatagaatagtgggaagagctccatgccgggtgtccagagacctcagcacacatgctgtgatgtcaatgcccgttctgtgatgctgaagatgccacggagttcatttgcatgcagaaaccatgcatttcttaagttatgttatgccttagggtttactagggtctcatccagggcttgtatcagcactgatgcatccacttggagcacaaaggggagaggaggaaagagtcaagacagcaggcatcttatccgtctttgtttcgacttctgccaaactcagatacctgctatctacatctaggaagaaactcccaggtccttaacatgactgatttcccccatatggttcctaagctgacgtttcctagtctggtctttttgactcatcagcaaaggcgcctgagccaaacactcctgtagtttcagcccagggatgagcaacagcagagttcccatctggacccccacagagggtgataacctccaggcaggatccgggctgttctgctaatcctttttagagcagagtcaatgtatcattttgcatgcacctagtccttttagagcagagtcaatgtatcattgcatgctcccagtagttaatcagactctcttcagtgtttcagcctttcagtgacagccaaaggatgtgtatagatagaagagcagaggaatcgttttttgtttgtttgtttgtttgtttgtttgagacagggtttctctgtgtagtcctggccatcctggaactctgtagaccaggctggcctcgaactcagagatccacctgcctctgtcccagtgctgggattaaaggcatgtgccaccatgactcagcttcgagaagtgttttgtattcacttccaccatcacatctatcaacttctctccgatttagaaaactaggatcaaggtgactacattttcttgcagttagaacggaaacaaataaacaaccaaaatgtcccaccttagactcagtgtcctctgccatcacagttactgtataaaggaacagccaaagaaggtattgtgacagttgtctcagtgagtaggaaggctccacctctttagcaaaagagctgacatttcttcttcagcgctggggatcatgcaggcaagtgtttgctggcatactcccagcaagaatggacatttccactatgatacgctcacctgggtctaaggcattgctatttctggccccaaattgcctctgagaagctgtgtggtgccctggcccctggccctgactggctgctcccttagcaagatgtattccgagcctttgctgactttctccctttgcttgggaagtctcttccctcgctcttttgcggtaaggtgaactttaactttttccttatgtccttccccgtaggcaagaagcgaaacccgggccttaagattccaaaagaagcgtttgaacagcctcagaccagttccacgtaagttggccggatgatggttccattccaaacacttgtattttacgagcttgctgtggggctcaatttttttggacccgtgagcaaggtcttcagtttgcacatggctgttggaaaatacattcagccctttgagaggaaagttctttgctcacgtttctgagctctaaaacagacttctagtctacactgacccacagctttgaagtcagtgtctcagattactggctgtgtgagagctatataccatatgggagctgagatcctatatatatatacccagcaagttccccaggtgtggactggctcaacactcccctctagataccaacgaacaaacaaataaatccatgtgtttatgtgtgtgtgtgtgtgtgtgtgtgtgtatgtgtgtgtggcaataatactcttaaaattgagttgaaatgggagggtggtatttgatggtattcatggcattttgacacttagtcctgactgtaggtacagaacaaacgaagggaatgcctcttgattagcggaagctgtcacccaaagccctaagtgagctcaggtcctcttgcatgtctgtgaggttggctgggtatctcccatgcagctggaggtcttaagaatcaatgcatctgtgtccaaggagtggggaatccaagaccataaaccatgaagcgctggagcggcagagcaagaacggaagagcccaaccctgagtctgtttaacctcaattcactaagcctcctggtaaaggcagtttgaccttagctgtgaagcatcgtatcagaaagagcaccccctagtgttaggatgtgctcatgaaaatgaccgagagattgtccaggatagaaaggccctggcttgccatgcagcaacagagagagactttctagggttgccgatagactgaattcagttggaatattcctttcatgatgatgtgtaggaggaaattcttcctcttcctacgtgaatatcgggtttgtctgaagggaatttttcgtctgcatagtttgccattctctccaactgtaaatgtgaaaaaaataaaatgtgaccctaattccttaacattcctctctggcttgtagagcatgcagtaaactatgactcttcctcgtgctatctgtaaaggactttatgggatcgcactttgacatggttatagttagagggggttgccgaggaatgagcatgagactccagtgtactcttggctgagtctatagacacccgcctgcctgcttgttaacaacttatacaactctacagtgttctcataaccaaggaagccatgctggcgcacatgcgagaacttacttgagttcactagccatacaagtggtcgcgtgtgtgttgtgtgtgtgtgtgtgtgtgtgtgtgtgtgtgtacttgcctgtggagttcagagggaatccattttctctttccaccaagtggctcccagatactgagctcaggaccccaggtttggtaaagccgagattgttctccactgagctaccctgccttcctgtgactggctgttgagttatttatgtattctacgcacaaggactttcccagttatctcatttgacactacttctttcagcatgtaattcgtctttttcattctttcattgggctttttttttttaacagggcagaaaaatttgatttgatgaaatattatatatttttgattatatatatatatatatatatatatatatatatatatatatatacacacactgtagctatcttcagacgcaccaaaagagggcatccgattccattacagatggtcatgagccaccatgtggttgctgggaattgaactcaggacttctggaaaagcagtcagtgctcttaaccgctgagccatctctccagccctggaatattatttattagttgttattcttcctacagattatgcctctgatacataagaactcttgttacctctggccctgaggattctcagtgatcctgcttagaaactgtacctttaccttgaagcccaaggtccatttggagctcaggttttgtacactgtctattgcactgagggttttgggtttgtttttgttgacacatttccagttgatgtagttcagatggctgtgaactgtcccttccctgttgaattgccattttcatttgtctgatagtaattgggctatttctgcatttttttttctattctgttctcttgacttttctgctctttctctgggctcacgatatcttattatgtcatagggaatgtggtttctcctattttgctcttttggaaaattaatttttttttgttttcttaggtttttgtaatacacacacatatacacacatatgtctacatatacacacatgtacatatacaaacatgtattccaaagttacattggcccctgaaagagtcttttcttattagctttagaacaaccttgtccttgttcacagagacactggctgacgcagagcttctggattttgtaattttctagtcagatgtgttgtcagatagagacaagtaccatttttacttttccccttcctgccgtgctggggtagagcagagagcctggaggccggtccttagctcaccctgtgtggatttatggcatgcttgttctgagtcactgtctttgcctctgttttctgagttgtcatctcccttgactgttagtaactagttcaaattcaattctaagctaataattagcagtttgtttaaccttgacaagtcacttggtatgtgtgtcagggagtttttctcattcactcgggaagtgaaacggcagactattcaagggtcgggtgctgtgtgcagagtccttcagcttagtttcatgtttggactctaagcttctccagttgcataccttcgtttaggcatgatttcttgttgcagcaagcttaagttccttcttcaagagtgggatcaagtgagaggatcactattgagatgagaaaccctcatctgtggcccagatcttggtctatcataatagctacccagtgaaaggacgctgcaaattatttagttttatggcatagcttttatgcatgcaagctggcatatagagctagggatgccagaggctcagtggccttcttagctatatgtgagatcagacctagtagttcttggttagtaaatgagagcccttgacctctgtagtgagagttcatcatggtggagctccgggttctcatgctattatcttattgaagaatctgaaagcattttatgtcttttgatgttaattcttcccactgaagtggagacatagctccttgagtatcacagaaggtcaaaaagctgttttatatacatgatctactcatgcttctgaccacgtaataaaataaacaaacaatgcatgtaatagtaaccagggagctgtttatctgcatagcaggtgggtcttcaatcaaataaatgaacagtacatgtaacagtgaccaacaagctggttccttgtatacagtcgtagataagtaaataattatcaaactaggccatcactggtattcactggttgtcttaggcaacctttagaatacatttggtcttccagggaaagaattttctactaagtttggttctttccccagaggaataaaatattgaataattgacaagaatatccaggtttaagctttgtgtggctaacggtgaccacctcaggtaaactaatatgttcaactctggatgtgaggagcccagtgtctggaaatccaacctgagctgtcaggcttggctccatcctttgatacttttggcagagctgatgaacccagaggccccaggcttgggtggattagtcattttcattggaagcctgagtattaggaacccatcccttgattcccttgatttacatgggaattgtggagtgggtaaggcactttatccagttattttaacttctttcttctcttctgactcctttggtcaaggctgaggattgggtgacatgatgtttttactcagtgtagtcattaattgtgtttctttataaaaatcaccaagcttttctggtgtgcatttttattcatttagaaaatggtaccatgtcctatgatgttgccatgaagtataagcagagatcagagtcaggggcagcaagcatttgggaaagctagagagtatgtctcctgtgttgtaacggagccatggtggcatcaattgtatattctttgccggttatttttatagaatattgtggaatcattaaatttatgaaagactttcatagctggctgggccataggaggtggtttgcaagccatggtttcaaatagaagattggatctggaagaggatctatctatccagtagtctcattggttggcaagaaaatggaggtagcccaaatatttagtgacttttctttctcctccatagctttaccaaggaaaaatgtcaaagagtttgttctagttacatttgtcttcctttttaaaggctgttacaattagtggaaacaaattgtaacaactaaggaaaaacagctttgaccgcagaatgagaagttaggagtagagagatgttccatgttccagaggtaggagtgcttacttctgtagagtgtctgaattttattcccagcacacacaacgtgtgtgctcacaaccacctttaattccagtcccaggggatctgatgccctctactggcccctacaggcacctacagccatgtgtgcatatccacacacagaagtacacatacatacacggaacttaaaaaaaaaaacaacaaattaatctttaaaaagaacgagaaattaggttgtagaaactcggctcttctggaaggcttttctgaagacaaattgcctgcttggaaacaggacacatgtgggcttcatggcatgtgtgcgacactaaagttgtcttctttcttctcctagtctgtcttatgctttgagttagtcttggagaggttccagtgttctgccaagctgaaatgatgtttgaagtaagggagggcttgccctgaaagtcttagattgacaggcacgtttatgtttctactcctcctttaccttcatgattttatttgtgtttgtggtttcagcagaatagataaaaccataatacacaaggagaaaatgaacattcagcaagtgtcccgatagtctttcggttcctgtgtgataaatactcttaggggaggaaagaatttatttggattatacctccaggtcatggcccgtcgctgagggaagtcaggataagaactgaaccaggaacctgaaagcagaaattgtagaggaactctgctctctggctcagtctctagctcagccacagctcatgcttagctagctttcttatataacccaggtctacacgaataggaatggcaccgcccatggtgggctgggccctcctaagttaattagtaatcaagacagttctccacaggcttgcacacaggccaatctgatctaagtggttcccaaatctatgctctctgctcagatggcagtaggcttgttaagtccacagatccatctaaccaggatggcaagtgacccttactctctccctttcgtcttctcttcttctctcccttccctccattttcctttatttccttctgcagacagttctggcatgaatgtgcgtccaagggtagcaccaatattgcctgtcttcatctgctatttgttctgtttgcttgatcatgttaggcacccgtgtcttggcatctcttatttttggtgcctttattttgagaaggtacccttctcagttcccggtgaggtacccagccagagccaaacactgttctcttcggcggcttcctaccaacccagagcacagataataaaaaccaatgcccaggaggagaccatggaaacacgaagtcagcaaacctctggctcctgagacagccctggaatagaatgttccctatgtacagaagaaatgtcactgggcttgggcctgtggatacggaagtacgatgagatggtacctcaggagacctgtgttcttcttggtcaggaacaagtccttttggacagccagtgaagcagggagggggtgacatagtattttggagttcttgttttctatgaattttgtaagttaagacaacattccagttttttttttttttttttaaaaaaacaattatgggaacaaatggtaaaaataattgaacatgttggtagtcttgaatggaagaaagcgttaacaagtgtatcaccatagcattgtctgtatcagggccacttaagctttttccactcgtgacctgtttttggtcaatgaattttaaaatataacgtcacatatataggaattttagaggaatacatattagacatctactaatagtaaaccctaaataactttattttaagatatttccttgacatatgtatcacttagccattgatgaatattaaagcaaatttgcatgttaatgaaacagatgtgcttgcttgtttttacataagcaatttaatagtgactgagtatttgatactgcagtatgtagagtgttttcagtgtttctccaagttgatcagtgtttttatctcataactgtcaatactgagaatgccacctggtataactaagtattgtaaaacagcaagactttagttagggccatttcagacattgtttgaaactttgtcctaatcccaagtcaaaatacactttaacaattgttttatgaaacttaagtcagcatgtcaaacagcagatatccaatataccacttggatacttaaacactaagggatggttgtagggcttacttaaacactaagagaagttagtgtgacaatattaaggccttgtttcccatcatggaacgattaggaagcagataggtttgtgtgcctagtgaaatcacatcaacaatcatatgcagtggtctgtaattatatccaaggtacttcaggcagtgttcattgacgtgtcatggcatgtgacagtgcatgctatggacaggatacatgctgtgcgctcagaatcgaggctgcagagaggccaccccatgcagcacaggtgagtgccatgagaaaccaatccgtttcactacggctttgatttctagattgacgtttggttgttcagaaagcttttcctggtgtcatattttttttttttttttctgtaatcaccggagttgtacagcgcatggggtcagaagccgtgatttcgaaagctttgttctatgtgacactcatgcctctttattgaacatttactgtagaattttacttggagtatctcatttaatactcatccctatgccactaagtatatgtattactctcacatgttaaagaagggtgagatgctctgagaggtggtgcgagtgaaacccaaatgcattttatttcaagccctgccctcttccccattgtccctctgtttgaccatgagtttgcaccagtttccttagagcaaatccataagctgacctatttgggaaggacacagttgaccaaatatctcacactgcttcttttatcccttatctttcttaggccgcctcgggatttagactccaaggcttgcatatctattggaaaccaggtgagaaaagtcatgtcggagtgattggtcctttgatcacctcgtatgcactcttccccactggacactggaaaagccattccctgtggtagaatgtcagggcatgggctaaaaaagggtgttgaattaaaagggaactgactcctgacgattttactattttgaattgtgaattgcagtcaagcgattgtgatcgtcaaggaaggcatctaagtacaatagatgtttcacttgggacagtgtttctcaaagccacacaggtctagttgccattagccagtcatagattcttaggagctgcaatgtagattgattcagaggcacagtttgaataccaagttgggtggggttgggtctattactaaggacaagcaggttgtctaccatgggaatcctgaacatttcctttgtgctcctggctttgagtggcaccttgccatgttaaaaggacttgtggccgagctgtatcacaccagggacaccagaagaaaactgataaagggtagcctactcggtgtcctgtttagtattcactttcctcttgcgtgaccacctttcctccttgcagaactttgaggtgaaggcagatgacctggagccgatagtggagctgggacgaggtgcgtacggggtggtggagaagatgcgtcacgtgcccagcgagcagatcatggcagtgaaggtagagttgacattccgaaaaatgttttatttcttcagtgtatttgcttgcccatcttgactgtgaactagccctttttacagaagcaaaagaacccacaataaagttgctttttttgttttttttttgttttgttttttgtttttggtggatcttaaactttgagtcgtatcaactttattttctaagtcttccttttctcaaacttttagtttttaaagaacatttttgagaggggatggggggaaggagagagagagagagagagagagagacagacagacagacagacagacagacagactatgcccatgggtacaggtactctcgcagggcagaagagggctttagatctcctggagctggaagtataagcaattgtgcactacttgattttgggtccagaaactgaattctggttttctacacacccagtatgtgctcttaacccctgagacatccttctggtccctgctactgtgtaactaattgcacttaaaatgatttatagtactttaaaaacctcatctaataccaatccaaagaaaatttccttgattatgtcgaagtgctgttatttctgttgttgtttttataaaatcagattctaaacaaaaggctctttaatagcgtattgtgttggtttaaaaaaccaccccttgaaaattaagaagcaaaaactgagaaagaaaattgtctctatttgtagggaaaagaggataaaatgtatctagtattgattatatagatcttgagctatgggcagaagtttggagtcagcctacatggcttaagtggattctgcgtagtcgaggggtgtccttagaatgtgggaagctacgtgtccaaatgacagcactttatgttagagacacaatcatctgtaccttttgttatccaaattcatcccagaatgaattcctaagtcatacctaagggtgactataactatagtacttcaaggctccccccaaagtggggattttttcttattttatttttcttttaaagacttatttatctttattgtatgtgtatgtatgtgtgtgtgcctgactgcatctatgtgcaccacgtgtgtgcagtgcctacagagtccagaagagggcgtcaaatcccctggaactagagttccagacagttgtgagctgccaagtgggtgctgggaattgaacctgggtcctctggtcctctggaagagcacccagtgctcttaactgctgagctgtccctctagccctggctcttctcttttcctaaactgttgggacccaggtaagcagagagtagtcaagggtatcaatcacattttgcatcgaacagacataatcattaaacgaggttgcttttgcagctttgaagtgctttctggcattcttgcccattctctgacatacactccatgttttgcttctaatcaggggactggttggggagtcaaatggtcagcgatcgtcattatcttttcatttgttcaaacagcgtatgtttagcgacgctgtgggtaggtttctgctaacagtgtgaagttggattctgtcgttcagatggggctttggtgggttcctgctttttcaggcgactcttcctcagagtagtaaccatatgttgtttgacttgcgtttcccttcagcggatacgggccacagttaatagccaggaacagaaacggctgctgatggatttggatgtttccatgaggacggtggactgtccattcaccgtgaccttctacggtgcactcttccgggaggtaagtgatccttcaggccagtgtccaaggaacaacagcgtaagagcctctggtcgcatagcctcactactcgctgccaggtgggctgctctttggaaattgtacttacttttaaaggatttcaaagcttgaggagaaaccatccctttcttccaaaagctcaaacaagaaacaagagtcctttgggaaaaaattgttggttatttatttttctttttcccgtttccctcctcattgacaatccttggacttattggtctccagggcgatgtgtggatctgcatggagctcatggatacgtcactagataaattctacaagcaagttattgataaaggccaaacaattccagaggatatcttaggaaagatagcagtttctgtgagtatatcatgaaccccacctacttaaggagaacgggagaagtccaggctttgtgtctttgcctagttactaccatttaacacattcctgttgggtattgtgtcagcgggaggctaagcaaatgcttttcttaccagtctctgtgcagtacatgcagccgttgacctggtttgataaaccatgacaaatgcttctattttagttttgtttctttggctgtgataaaacaaaacacacacacacacacacacacacaatcaaaactcaaaaactcaaaacagaacaaacacaaaataacaacaaagcctccgacaaaagcaacctaagctagtaagggtttctttagctcacaattccaggttacagaccagcattctagagaagtcaaggcatgaagaactggaagtagctagtcataatacatcctgacttaatgcatgcattttgctttctctattcttacgcaatccagaatctactacctagagaatggcaccgcccacagtgggcagggtcattcaacttgtatgaacagatcaagacagtcttctacagacaagcccagaggccaacctgatctagacagtctctctttcgactctccttcaaagtgattctgaattgtaccacgttgacaattaaaactgaccaccatggcccccacacctgttttcgtcatctttgacttatcacttctacatctgagtacatattgtggttcaaaatgctttctttatttctttttctaaaaagatttatttatatatatatgagtacagtgtggctttcttcagacacaccagaagagggcatcaggtcccattacagatggttgtgagccaccatgtggttgccgggagttgaactcaggatccctggaaaagtagtcagccagtgctcgtaaccactgagccatctctccagccctaatattttcttatggaattagaagacaaggcgaccttaacggctaccaaggctcaggaaggtggaggaaaatgatggttaagagagcagtaggagctgctttaagatacaatcttataattgtatccgttctaagatacagtcctcagtggtagaggcatccaattttggtaacttcctgttgttttccccattagggccactactagttgagaacaatcatgcattcaccatctttaagcagggagcattaataaaatggaatacacttagcgttcaacttctttccagggatgggctcaatacacggactctgtttctcttgcagattgtaaaagcgttagaacatttacacagtaagctgtctgttatccatcgaggtaagcatgcgtagcgctatcttggcagttgcttttgtcaagttcacccccctcccccacttgtctcctttcctctcccactcttccctgtgtgtatggggggtgaggaagacaggcagaaaagctaaagggtttccctttggcattgtagaaaaaaaatgtcaacagttgcgttacttttctattactgtaacaaatcaactgatgaagaggaaagtttattttggatcagtctagggtttactagccttgttactttgtggccagtgatgaggtggagcaagatggtgggactatgttgtagagcaagcccattcagcttatgaccttgaaagaaacagagacgatgtgacaggcatcccataactcctttccagggtagtctccagtgacctaaaacatccctccaagtcccacccgttaaaggttgcagccttatccagtagggataaactgaggacaaagcctgtgtagcctacatctgggtttttggaagatgtttaagattcaggctgtaagctgtggctgtcctttaccttggctgagaatataagaacaaataaattttatagtatacctaaactgaatagaaattcaccaaggtgagctatggatagcattgagaacttggaaatctccagaataaagcagagcttttccaggctacaggaagtgggaaaaaatgactctctctctctctctctctttctctttgtctctcttgcttctttactacccttcctcttctcctgttagctcttaattttcatttatttttatttgtgtgagtgcatgcatgtgtgcatgcgtgtgtgtctttctcatgcacacagagtgtgggtgtgctcaccatgtacacgtgtagggaaggatgtcaggtccttgctctgtcactccctgtccatttctttgaggcaggctctcacacagaagcagcaggaaatccccagcgacccccagtttccctacagaactgggtcagtggggtgtatgaccagggctagcttttaatgtgggctctaggggttgaactcaggtctctcatgcttgcactgtgtgtgtgtgtgtgtgtgtgtgtgtgtgtgtgtaggtgcccagccaccctcagctctgtcatatattcatccagttcttcatcaatctaatctattagtgcagagcccacagaggccagaagagggcgttggtcttctggagctagagttacaggctgttgtgaactgcctgatgtggatgttggagtctgagcttgggacctccagaactacagcaggttctctagtggctgaggcatctcggtagcctcaaaagccacctttagtatagatgttttgaataacattaagaagacctaagagccgtttaggaaaatctattctttaaaaattctatatagggattctcaataaagtgataaagtgtgtgtgtgtgtgtgtgtgtgtgtgtgtgtgtgtaatgtgtgtgttgtaccctatgtgactgtgggcactttgtccttgtagaggtcaaagggcaacctcaggtgttggcctttgccttctacctcctgtgagacagcactgtgttggtcattgctgtttacatcacgttagctgactcctgagctcctgtctctcccttctccatacaaaaatgctgggattgaatgcacattcattttcatccattgagccatctctccagccctcacagatcactttagtttggtaatttttttttttttttaaattcctactccacatatgggagcaatgacataagataagcaggggagacaggttttcccattttgagattcacagtcctgaaagacgcagacaaagtgtgaagaattaaaagcccaactggagaggaacgcgctgcgtgagtcagggcctttggtgacgtttgtgtggggtatcttggcaaagacagccctgccaaggcaagtggagagtcgagagccctctggtggcgaaaaagtaaccctttcttctctccttcagacgtcaagccttctaatgtgctcattaacacactgggccaggtgaagatgtgtgactttggaatcagtggctacctggtcgactctgttgctaaaacgatcgatgccggttgcaaaccatacatggctgtaagtaccagcacgtagcgtgcttgtgtgcgtctacccatgcatgtctgagaaatgcacctgcttgcaaaaccaggcaagaaagtaagaaatgcatgcctataatggagaattggaatgaacctcggatttgagaaagattctgccttgtgtcattttcttagaggttttatgtcagaaatcattttcactcgctcccaatgttgtcaccatcctttgaggttgctataacaaaatactgtaaactggacaccttacagaacacagttttggtttttttttttttttttttttttttttttttttttttgactctttttgctctggcaagtccaagatcaagatattggaagacgcaggttgtggatgctggagtctgtggtgagggcccgcttctctgccttatttgaggttcctgttgcgttctcaagtggtggaaggagcagggacctctctaaggcttcttttatgaggatactaacctcattcatgaggaacctaccccaaatctacagccatccaatagaaacaagacttcctgctatggtcacaggtggcatactttttttttttttaattttatttttatgagtacactgtagctgtcttcagacacaccagaagagggcatcggatcccattacagatggttgtgagtcaccacgtggttgctgggaattggactcaggacctctggaagagcagtcatcttgccgcggagccatcttgccagcccctgtgggatatggttttaacatgtacattttgggatgacacagagacacaaaccatagcatatatattgcctttcggaattatctcaaaggggcgtgttatttgaaaatgcatgtaagtagtaggcacttgcactcagttttacacactgactcacacccgaatgttagcttgattgctaaggatagaagactatggagatcttaaattatccacacaagggagctctggtcatcacagaatggccaactggaggaatacatttatcttagaagggacttgagtttgagattgaaaacttcttgcccatgtttgagtaaaatccccgaggtctcttaacatcagacggtagctatgaacttctgcaggcttttgtggcttttgagctgttgatgttttttaccagggataattttaatggatagaggagcttttgaatgtgtcccggtgttcttcttaaggcaattaaaatttgttctgcgggatctgaattcattgctgcctgtgagaaaaaaccaatataaagaagggaagccctgtggagacatttcatagcttgtgattagccagtcttttggcccgggaggcaggctaacagagtcaaataactcatacggcaagtgctggtgtctcctcctgagtctttattgagctacgtggcattgcaatcgtctttccgtttcttagctgtctgtctcctttccagcctgaacgaataaatccagagctcaaccagaaggggtacagtgtgaagtctgacatttggagcctgggcatcaccatggtaacctatgatcatcactgtgggctacgaggttctgagcgcaaacctggatggggtgggctttggggacccagaagcctttgatatcacacttgggcacccctttctctctgagatggcaggttattttccagggctgattgtttgaagtactgtacagtagaaactgtacagtgagatctagcagtccaagttttcctccctttctgactgttactagccgtatgaccttcacaaactcatgtattctcactggtgatctttctgatagaaaagggattaatagagtttttatagtttaaattaagtgattaggaccaagacaagaagcttaagttacaaaaccaggacaataaaagaaataaaataaaataaaataaaacaaaacaaaacaaaaaaaccaacccaaaccctctccctgctaatgtgtatggaccctgataggccaaatgtactaggttgtgtattttaatattttgagaacagacctcatgtagcctaggctagtgtcaaaatctatatgtagcccaggatgaccttgaagttttgatcctcctctctctgctcccaaagtcctgggattgcaggcatgacccatcatgcttagtttgatacggtcgacccctggattcatggctactatgcaagtactctgccaactgggcaacctcccaggctctgcactgaacatttgcatggtggaagttttagatgtgtgagttagatctacccttggaacacgataatgcatagtgtactttctcaagcacgggcctatggccacgcagccagtcccttatctgtaacctctgtgactgtacatttttagtctatcgctgaggtctggaattacccacagtggtcctggctactgcccaggaccagcagctgattatatccagtgagttattccatgtccctgcccagaaaacatgtgattctgtaacagcagagtggcctttactcaagtccaaaaaaagatcagtcatttggtcctgggtaactttttttttttttttttaattttccatttcaccaagagacctgtaggtggcagcagaggcacagtgctgccaaagtctttacgctttcctagtctggccacatatttgaaaaactggttgtttcctgtgttgaactttaatgctcttggctgataagtttttatgaaataggcccgggtgttatcaaggagctcatttatttagataggtttaaatatctgccactggcaagacaatattttaaaaagcaggaggcactaagattttgcgagaatgggtcattagcttggctttcttccctaattatatttgagcgtcacctctggtctttctaaaaggaaacacagctgcttcctaatgagcatttcttaaaatgttgccacccctcccttccctctgtttagatcgagctggccatccttcggtttccttatgattcttggggaacgcccttccagcagctaaagcaggtggtcgaagagccctctcctcagctcccagcagacaagttctccgcggactttgttgactttacctcacagtggtaagagaaccctgcactcacagatctatgccaaagacgacgagccgctctcatgactctccccggtggggtctgatccatcacatacgctcattccagaagcatccacggagcatgtcctctgggctgcagaacatagccctggcctctactcctagttccaaggctagtacggaagcgcactcaagtcaatatttacttgaaagtactatgattggcaagaccggatagagtgagatacataagtatttggaggatgcaaagtcagatggggttatttttgtttcggaggaaataaatcctgagcagaggccatgcgaggcatttccctagctaaggtgagtcaggaaggagaggtcttcccattggaaggattgcgtcactaaagcaagaaagacccctctctctaggacctcgtgatggtcagttagtttaacttccaccctcgtacaatctggagtctctgttgtttagaacaggttggcctgtggacagtctgtgggggattgctttgattatgttaactgatgtgcaaggatctagcctaagaggaaatggtgccattgccagggtttggctcccggactgtatgagggagaaatggagttatgtactcgaagcacgcatgcgttcgtttctctctgctctagacccgaatgaataaggtttacgttcccgctgccacgacttcctgcagcgctggactgtagcctagaattgtgagccgagataaatcatttctcttttaagtcatgttctattatggtattttattccagtaacagctgtaaggagttggatattgactacagcatagagccaaagtttagcaaggcctactggaaagctaggggtgggggatagatgtcaagagtctctgggactaagaagattgttggacattcaagaatgtttcccggatgcttccaagtcctgcagaactttgccttctgcagaacccatgttatctgtggatggacttgtcccggtaggcataataggtactgccgggggtttggaggctaatccaaagagggctggagcacggagagagaaggaaatgactagtatagtcagagaggataaaagaggacacaatatcttccaggtactcacatgatttctgtctgcaccgcggccacgatgcttagcgtcgtcacgtgacagtagtggcagccgcggatgcagctgggaggaggatgtcaagagggcagcccgagtggaacccagttagtttagacagctatcctgtgaaagcagatggaaacttcgagcgagtgggtgggtcagagctggctctgattccagctgtgtctcgtggagggagtcattcctgctcagactcgctgcgtgaattgacctagacctgggaagggccccgaggtacagaggataccgaagcaacacacctttggtctccttgctcctttggacgtggtgttccaaatacagtttttactggggaccgtgatgacactgggcaatgcttggttgcttaaggctcttggaccggtacttggtgctcacccatctgcatccgcatccccatcctggtgctttcccttagtgttttacaaggctaccctggtggcttattctgagttttaattttggccgaaagaccagagagaactggagtactgggctctaggacagtgttgttgggcatctttcataaaaatgcgccctctcccctcctgaacaacccctaagtccagttagtgccattggtcttcaaacaagagtgacccccctccctttgcagccactaactacacaggtccccccacgagcggtggggtctcccagggaccccttccacagccacactggaatgtcttgttcctcaggtcttcttgctgctataagtgggtgtgtgcaaaagccgtgccacttgcagaacccagtacctcacaactctctccctgacctctggcagaacccagtacctcacgactctctccttgacctctggcttgtgcattctttctgtcccttttagaggcgagaggcaccaagctgagatgagatggaatctcaaagtactgctactctggcattctgggatagctaagcaggctgagacctgagtgtttattggccattcccgtttcttcttttgagagttacctatttggtcccttagcctgtttatcggttggaagatttatttatctgggcatttaaaatgtaccattatgtagtagaggaagcgaatccttgtccagtgtatagatggcaacgatttttctcctgttggctgtccttttcactctgataatgatttactttgttgcatggaaacttttaaatttcatgtaatcccactcatcagctcttgggattattttctgtggttttggagtcttttgcctatgtccatatcttgaagtatttcagagcaaaaacaaagaaacagtaatttaaaaatacctcctttatgtatttattttaaaaaaagcacagccgaaggctgcttcttttccccagtacatgtttttatcattgagattttaaggaacttccaaggtgggccgtactgacctgtattagttacatgttacataaaagaccaaactcaaggaaacatggaagaaagagttcatgggtttggagggataagtctatcatcggggaggcagagcaagcagcaggcagcagacttggtagctggagcaaaaaaagccaagggcgcatgtctcgaatctcaagcaggaagccaagagagagtgagccgggagtagggtgagaccctaagttcttgaagccatcccctgtggtatacttcctccagcaaggacacaccttcaaaaccatcccaaacagtgccaccgagtacagcccaactattgaaacgtgtgagactatggtgtgtgtgtgtgtgtgtgtgtgtgtgtgtgtgtgtgtgtgtgtacgtacatctctcaaaccaccacatgaccaaaaggccttgttttttcatgtttgtaatagaaagttcttatagtctagtcttgtagaaggcttaatatgatttcctttttaaaaataagatcttagcagatagatcataaacacacacatatctatatggaatacacactatatatacatatgtatatataaataatgtatacatattgtataatgtatatatattgtacatgtgtttgagtatatataggtgttcatacacatatgctgtgtatgctcttgtggtatatagatggtgtgtgtgcctgtgaggggagccaaggccgacctcaggcgtcctttcttgagtatgaccacctcatgatttgaggcagggtcttttattcaattaggctgcccagtcatgaagcccaaggattttcctatccatacctccccagagctaagattagaagtgtgtgttgctgctcttggctttttatgtgggttttgggggtcaaccttgggtcttcatgcttatggggtgagcactttatgtcccgagcctgctctctggcccagtagttttctctctaaccttttcacatgtgttgacacaggcaagccactagaatacattgcctgctgctagaatagttagacttatgtttgcatttcctccaggcctactttggagtctcagtgcccagccggctagcctggtgccgtacccaagtgtgttggaggcccgtccagatgtcaatactgtctgactcagagtagctaaaaatcaaacagtcgattaagcattgtctgtttgttcagaacaggaaagtaaaagaggcagtaggtatttatttatcttttgacaaatgtatggcttcggaggcgcactgtgtttttattctgtggactgcaccaaatagcccttcttggaaatgatcgggggggtgggggtggacatgggggtgggggagctcaaataggcagagagctcctggtcagcatgaactgcaagctggcaattctcaaggcagcgtggattgggtttgtcgtgccagccatggtcaggagcctgtgttgtggcatttggaagaggaattagagaagttagctaattgcacacttgaaaatgacaagccacttgaacatccaaaagccagatcccatccaagaggaaagtggtgtacctttgaactccgaggttgttattttatattgagtttcaaacattttctactaaacatggaaaatttgcttccaccccaactttatcttgggtattttactattcttagtgcttcttttgaagtgtttttgatttaagatatggagggaataggctatatccattatactaatttaacaaatagtcttcctttgcttgctttctttcctttctcccttcctcccccctcaccttctccctctccacttccctccctccttctctacctccctcttctctaacctcttgcccccctctgttattcctttctttttcaataaggtttaactatatatatactaggctgtcctaaaagtctctctgtagcccaggctggctttgattctgtaaccctcctgcttcagcctcctgagtgctggaattacaggcatcattaccatggctggccgctgtgaaagacccttttgttagaattctatagtcgggggcaaactttccctctgattaggggctgtaagtcaaggggtagcttactgggcagttgaacacagcctctgaggtctgacagatcttaaatactttgtgcttgatcaactaaagtgatttttcctgaaaaaaattttttttaaagatggatcaaagcagagaggaaattttgcaaattttgcaaacgttctggggagaaaaatgtcctgtctcatggttgcttttacttaaaacttgaaagccgaggcagggaccgaagatgtagcttggtcatagagtgcttgcctaatctgcacaaggtctgggattctctctgcgatgccacaatgaatctttagagcttttagccagccaggaagaaagaatccttctattatacagtaaacaggggccaaacatcagtgctgccatggaggtcattggttgataccgtggtgcactgatggaggtcagggggtaacttacgggggtctgttctctcccactctatgggctccaggaatcaaactcagatttccaggcttggcagcaagtgcctgttaccggctgaaccatcttgctggcccctcagatatcctatttaatcccttgaatattatgtgtagttttagtgttgtatttatttgtgttattttattgacttaagaagttaaattgtttaaccaagggaggagaattctgggttcagatttgctttgaataatagctggatatttgaggcttctgtatatgtaaaaaaaaaaaaaatctaggatttgtaagtgaggtaacaatgtccccagaggatatttcttctgcacttatttctcagataaactgatacttgaatttagacaaccttttgttcctaggaagatggaagacagagataggaggcatgaggtagtcgtgatgggaatataaacaaatgtcatgtaagcctcgtggagatggttcttatgactgcattccaattgggagaagggtagagcaagtgggttttaaagagggccagccaattacccacagtccaagtattcttgccctcttggtgtctgcaccaatggcatttccaactggactgcttttgttgtggaagacaggcttgcacactgaaggatgcttagcaacatcctctgccgctgtcagataccgccaactagttgtgacaaccaaagacgttgagaaatgtcctgtgggatggaggtacagagtagctaccattgggaaccaccgacatggactctcagggtacaggcatatgcaaggccaccagtgggttaagagctcattcatttcacccaggtacacattctcgtatcagccccacgctgacagttaatgattctcctttctaacgcactctcatttttatcccaagttgagatgaactttctctcataggttgtctggttcctgaggccattaggtactaggtctgccctcagttctaggttgacacttctgtcctcacctctgcctgtagcctgtcacaggttccctggcttctacccacagcattgcctggaataaactggtggggctgcttttcagtttgttttggttcaaaagctttccctcctttgaatttttaaagagaatttcattttgcctataagcctatagttcaacatctcccagtgacgtcactctcccacggttttgtactttacacccctcatgggggttcgcttctgtgggtgtagcagagctcatgtcagatgctcaggatctcactcgctcaaaaggacccatcagcacaaatctcagggactcaatatgctgtcacactgtggttctcggagttcatagacaactctctccccattcacggctggaactaaaacatcaaataaaccgtttttcttcttgtttccattttagactcaggggtgggttgaggacaggggtgatgggttggtctctttcacattgtagttttatgaggactgcctctggtatcaaatgctataaaatgttggaatattcagagaacagaatgaccactagacagcagtgcgtgaccacaaaaatatttctaagaatcattgctaatttgctttcctttcttatccaccaagacagtgaacaagaagcacctccttagtaaaatataggtttgtggcttctgtctcaggcaggtttggggaggaacatagggaagcaagttttatatgagagggaaccacaaacagggaggagtctgcagttggaggcagtgagactcacttagtgtcctgtaagaaacgtgggccgacttcttttccaggaggtgggataaaaagctaccttgaaagaaagttcagataggttttgagatgtggtcattataggtaggaaaattagactaaatggcaaccataatgtattaaaggaaaataaacacacacacacacacacacacacacacacacacacacacacacacacacacttattcatgttaaagcaagcccaacatggtttaaaacatagtttctaagagttcacatttacaatagaagttagtataggagacctggtttttgtgcattaaaaaaaaaaatagttacagttttacactggttctaaaatcctaacagtgaaatacaaatgtcttctagatttttaatgtgcttatttttttctttttaagcttgaagaaaaattccaaagaacggcccacatatccagagcttatggtgagtgtgaacactttgcttgtgtgttagcagataacagctagggatgtagccatggctaagatgatgcataaataaatatttagggaggagttggtttgttgagatatggttgattcccaggagctggacacaagacagagttaagggtcccttttcactggtatttatccttcagaaaatattttgttacttattttctgtgcatgtagatcagaggatgcttggctggagtcaggtctccccttctgccaagtgtgggtcctggggattgacctaagggtcctcaggcttggcggggagaacttttattcgctgcgctatcttgctggtcctgttcatgctttttgtttgtttctttgtttctttgtttttgatgcaagctcagaataggtcattgttcccaatgatggttgccatgctgttaaacctggaaaacatttatatccaggaagttgacgttttcaaatctggaagattcccactataagtgtgctagaaatatgagctcagagacctcaatgggataggcttgtaagccatgtggtccatccatttttcgtaacaaatcttggatggattaagtgattgcctttctctcgacctcttggtcttcattttggtggaaagaagcatagtaagtcctttgatgggagtagagcacctgctcctgaatttattgttttttcctatcagtaacgtgacgagatcaaaacctcaacaccgctgctctataatagtgcctctacctaaacagatgtagaatgtggtacaaaggcattttggagagaaataatttagactatatgtgaatgtgtttactgcctatccctcagatttatcttaatgataaaggttataattttaacagtaggaaggagatgttcgagtttcgtttctgttgcttcgaaaaactatcctgacagggaaatttaggtgagaaaggggttattttagttcatggttttaggttattctatcactgccaggaagtcagagcagaaagaaagaaatacatattatcttgcttgcttgcatttagctctccttcaccactcctaaaacaggttaggaccctctgcctagggaatggcgctacccacagtgggctggatcttctcacaccaataaactcagttcagatagtctcccatgggcgtgcccacaggccaacccagtgtagataatccctcactgagactctcttcccagatggttttggattgtgccaagttgacagttaaggttaacctccacaggagaattatgatgttcaatcccaagagagagaagagcacaatttgagatccttgttagtgggcctgctagcggtagtcacagagtgctttcttctatcctaccaacagcctcactgtctggatcaactgagtgcaccacagaagggcaggctcctggtatctctttttgagcggtgttctggggtagctgagatacagaacaaaagctgtttggaaatattcataaaagttatagaggagaggctggaaagatagcttagtggttaacagcatttactgttgaggacctggacctaaattcagttcctagcacctatgttgggccctgtagctccagctccagagattttgatgtctgtttcaggcttctgtgggtatataaacattccacctccccatacacataattaaaaaataaaatattaaaaaagagttatcagagctgggcagtggtggcacatgcctttaatcccagcacttgggaggcagaggcaggcagatttctgagtttgaggccagcctggtctacagagtgagttccaggatagtcagggctacatagagaaactctgtctcaaagaaacaaaaaaaaaaaaaaaacaaaacagtaacaacaacaacaataaaagagttatcaaaagatgacatttgtgttcatctccgccatgtgttgtttgagttctgtagataggcttttatttctttaacacagaggcattctatgattggaaaaagtgaagtcagtccatctctttgagcttccattgtctccctttaaaagagcagtgtctagtattcaccactcagcagctatatgaaaacagatgtgtgtgtgtgtggggggggggcctggagggatggttcagtggttaagagcactgactgctcttctagaggtcctgagttcaattcccaggaaccacatggtggctcacaaccatctgtaatggaatcccatactctcttctggtgtgtctgaagacagcaacagtgtactcatagatataaaataaataaataaatcgtaaaaaagagaaaacccaaatagatgtgtggtctttgaggatatatctacttgcttgagttgaagatctcttcttgaattattattttttagaagcgacaactggaggcttttccaggcctgactccccttttgtggtatgcatgcatggacacttaacagataatttcacgtgaggtgtgatagacagggagtgattcctgtaggatcctattgaacttggaatcctgaagtctctgttttataactaatttctaatagaagaacattttctctgtagtccagctatttacagtgccgaacatcctcttttctttttcttcttcttcaatctaagtggcctcttatcaaaacattcaccagaaaacatttgaggaaaaaaaatgtttcctatacattggcatcggtgttgacgtctgccttcctgacacaatctaacaaacactgagttggggtgactggcacgtctattaatgtaagattgtgtgggcagccctccccctctatggcattagtctttgcggtagtggaaatggacgtgccttttaagaccgtaactattccctgctttcctgtggaattgaggttttgaaatggaaattctgagtcggagctccctgacttcagcactgggcaacacgtgctggaagggctattgtttcagttttaggaatttgtaaagaggtaggaagagggaaaaaaattatttttccaaataaaggaatattattatcaaggctccaacccagatatatacgtcttacagaatccccaataattttcaccctaattcagatggagggctatacgtgcctcaagccctatcttattggctcatctcaaacgtctgttttatagcatttttttttccacagcagatatttactaacacttttttttttttttttgggtaaagaactagctagaattttaggttaatgagccatgtaattgctgttaaaaatgaactaagctgaaagtagccatgttaaacaaaggaaagcaaaaagaacacgtggctgtgttccaataaaactttattgtaaaatcagacactgtattagtaacttttctattctagtgataacacactacaactaagtcaacctagagaaagaagggtttgtttgggattatagttgcagaaggttagaacctttgacggtggagccaaggcaaggtggcaggagtgggaagttgaagactcatcttgaagtatacgcaggaagcagcgaaagccaactgagagtggcatgagtctttgaaacttcaaagcccgcccccagtgacgtacttcctccagcaaggccacacctcccaaacctccccaaacagcgccaccaactgaggaccaagtattcaacatctgatcctatgggggacatttctcattcaaaccaccaagacgaggagttaggtttggtctgtggattatagtttgaagacccctgccttagatatttacccccagaaatagtagccaggctgttccgatgatttctcagtggtgtgattgtcttctccaaatatctgagaaagttctagattggaatggcggtatgaaacaaggagagctgaacccacagccctagaggttgaggtgtatacctgggatattttggaggcctgttagtgactgtggcttgcccctctgcttcctggcagcttgtccatgaatctccatgcttcttcccgatactatagaactcctaaatggtacagggtcctccctcttaggacttggcccttgttagggggagtgttaagctggagcaggagcctagagattgtgggactccattcgcccacctccaagttgctgtccttcctattcttagtcatttatagaaagaatcaagttctcaatgctcttcaacttcaaagcccctcacaaggctcttcacgccttccctgttgattggcttgcctgcttgctctctcgtctcttgtcctccggccctcacagactaaaaggcatctaaagaacttgttgtaaatcaagagtttcagatcgtattatctaatccattcatggactggagctccgtgtactgagctagcgagagcaggataaatctcgaggtggagctgataggcgctggactcagccatccaggcaatccgaggcttggcatgtcctgttttgatagtcaagagcttttaaagcacgttaaaagatccccaaatgttaaggggatgtgggaaagctaataagtacggtggttaaaaagaaaacaagtaaaaaacaaggccttggtaaggatgccacataagtggtcatttcatcgaaaagggtgtcacgtgtttggcagatgggggactttagagtgaagggccctgaatctagaacatcacattgggcataaggctctgagccagcactcagcccagccccactaaggggcagaaacagaagaactgagtcacagtgctcaacagtgaccacctactttctttggggttttattcctttgttccctccctctgtcgcattgtttcctaagacttgcatgggtgggctctcagttctccacagagctgactcatccagccctctgctgtcaggttccaaacaaatataattagaaaacctactggtaggcagagggaaggttgcgaacagaaccgctcatcagggaagcagagtgagtcatgactacatgaggaaagagtcatggtgatccattcacagtggccactgctggcgagtcagaggcctgagcggtgtagtgaggtggaggggtgtgtgatgcgggtgcctcgaggagttgtccttcagagtttctttgcttggtttttggtctcactagaagaaagagctgaggaagatgacgtaatgtatttctccctagctggcgatcggaggctctatagcccagcacttatgacccagctaagcaatataggaggattgttctgtcactcagaagaaatgacttggccatttgacttgcttggaatagggggtctcttgagtcacgccataccttttctctacacagtgtaagatgtgacattgtagttttctttaagttgacttaggccaacctggacacaaagaaaatttcttttccttttttcaatctttaatctctgagctgagttttttttgttttttgtttttttttttctttttattttttctgaattgaccagtagtctggcagtctgcattatctctgtgaatagctcaaactcttcaggattgatgtagtgtaagtcttagcgatgggtgtggccttggaaaaatggccttagctgttttaattcaacccaggttttccaatgtcaaaggcacagtgccttccttgcccattttactgttcagcgacattggtatcttctgctgctgccctgttccttgtcccctgacatggagaaactaagtctgtaaagttttaatcgatctattattgcagctgtctaaaatgattttgtagagagatggtcctagccaatctttgtatttctgtatggatggaattatgtagcatacttgcatatgttacttaaagtgtagatttttttttttttgtattggaaacctagacatatcaaaatgggagacggcaaagagatagccttgaggtaagcacatgaagaaatgagtgcttggtttcacaaggaatatgagaaatgacatttgcctgaagagagatattagcctgtttactaaacagatatattgatttgctaattttatatgttatcaatgccaagtattaataccatgtatttttcttctctttcccagcaacatccatttttcaccgtacatgaatccaaagcagcagacgtggcatcttttgtaaaactgatacttggggactaaaaagccatggacttaactggtcgaccctactgtggattggtgggtttacagggtgaagaaagttcactacagagccaacagaaagtcatcttgaggtcattgaaccctgcctttctgaggggtttcctctccccgtttttctttttcctctccaaagggggccttggaatctctagcgtaggctgaactctctagatggatgaaatacaacaaaggcttaggacttgaaatggtgattaaatatttaatggcaagtcatacgggtgggtcctcgagcttctcagatctctcgtgttctttacgaaatgaatgcaattggccctggtaacaaggtgctacagtagtgaagagattgtgaagtagatttgtagcgtatcccacttattattttaatatttatgtttcagtgcttggttggaaatattccattttatgcaagaagggagatacagagacagggctgactcggcagtatttatagggcttttatttttttgagttcaatcatgtctgtggtccagaggaagttatttaatatgcatttttaaggatattataaaaatctccagcaaaggggctcttcctgtacagtgtggcttgcagctctcatggctgctgctcccgactgtcaactcaaccgtggctgatcatcgcatcgtttgaatgaactgtcaaagttaatgtccccccgcctccctcccccaactttggaaaccatgaaagtcacttgtatcacggctcaaagagtaaaaaaatacaatggttctcttcaaatttgtggcatagtattagtggaaaaatgaaaataacagaaagtgatgtgctttttatagtttgcctatctctttctctctgtatgtatttgtgtgtgtgtgtgtgtgtgtgtttgtgtctgttttcgtgtgtgtgagtacatttattaaaccaagtcctacctaccacgtggcttctaggaacacctctattagttaaaaggacacctgataagtcatgagaggagatatggaagctcacagtgagaaatgaggttttctgctcttgtgcctcctcaatggatactccccaaggcctgcttctgtaacgcatgaactatcctgccttgctggttggttctcacatccaatgaagaagtcttattgttagaagggctgtgataagagaagataaacgccagtagtctttaatgaaatgaaaacttaatgaagagccttgggacagactgccaagttgtcacaggctcagaccatgtcttagtataataccatggagtagctccctccactctcaagctcttgcaggtggactgaattcttgtgattaaagacgtcatgagttctctaagcgtcctctaagattaagaagtattgtgaatgacagggaaaaggtagatatttgctagataatgaggaatgtttgctttgttacagtgttactataaggcaattactattggaattcctagacagcgtgttgataaaaagggaagaaaaaaaatattcatatttattttttctttccctctcctgacctcttggaattctcccttccatcccctctggatttggaagcgttaacagtagagtttccattgtattatttgcatcttcaggactctcttccacaggtcacctgtttagagtgtgtctgacacttgagcatcgcttttagagtctcttgtgagggatacctattggcagggctgaggaggtggctgtcagtgaaacacttgcatctcaggcctgaggaccagcattcagcttcctggaacccacaaaaacctggccttgtggcacaggcccgcaatcccagcaatggcaagataggaaggggagacagacagatctctggaagcctatggatgggttagcctggcctacatactgaaattccaggccagtgggaggccctgtctccagcaaaaggtagaatgtacctgtggacagatgaccacactctttccatccctccagacacccctctgcccactctacctgtttgattaagcacagattcatctgctctaaagactcatttgttttatttctttcttgccagaaaagtggtattcttctcttgattgtgtccattcagtttcccacccagttggaaagttcctttctttgacatagagagaagtcatatctgtcttccggctccatttgatcatcttaagagaacagaaagcaatgggggagaagcctggggaaccaaccctcttacaacttctggtgaaattcctgaagtaaattgtctttctggtctgtatctgactattcttaattgtttgccgtctttgaatcacttctaacaaagaacaggttttgcactcgtgtgcctgtgctgtttcgtctgtgagcccaggacaggaacctgtaagacatcatagtgggaagagctgctagttcaaggctggtgcactttggagccatttagatgccagtgtgggtgccagagtcctgtccccttggaattaattggttcaggtcgagctgggggaattaagaaagaaggaaggaaggaaggaaggaagggaggaaggaaagaaagaaagagaaagaaaggaagagagggaaggccttcatgtactcctgatatacaccagggttggggacattttatccaaagtccaaatgaaatggtcccctgaaatggaagagagcacaaatcgatgtagtaaaaaatggatcattgtttttagttcttgtctatcttctaaacctaacaggaatttacatatgccaaagtttccttatttatgatgcccttgatgggttgtctcagtacctcccgcccccctgcccccgtgtgtatgatgctgaagaccaaaatatcaaatacttcagcatatcaaacaattaggcccaagctgctttgcagcagtcctttgaagactaccactcaggtgtcagtatttctcctgacaactcataatctattagcaagcctgtgagttattttagcacaaggcttgtggatgctggccatatgcaatgttgagatttgcttagtctttgactaggggctttaaagcctgagttcttagtcactgagctgcccctcattattatttcattctctgtcgtgttgatattctgggtttgcctgcctccttaaataattatgaagttaaacattgaagccattcttggatgtttatcagttgtgtgctgatagatttcatagtctagaaatgaaagagagagagccgggagatggcttagaaggttggggcaacctggaagatccctgaagctcactggccaaccattagagcaaatctattagcctcaggttcagagaaggactttgtctcaaaaaaaaaaaaaaaaaaaaaccaaacttggagagacattgaagagagacccctcatgttggcctttagtttccacatagccacacacacacacacacacacatgctcacacccacaccaaaaagtatgtaccatacacacaccacacacaacatatacacacatcacacatatgcaattttttaaaataaaaaaatgcaatagtcggaaacagccaatagtctgtgcagaagaggagacaggtaccaagacaatcacttttctctagtctcctaataaacttgatctagtgtcttctataatcacaaaggaagtagaggacctaggatgccatggtttaagcccccaaaggtcttcattaaccacagggtttcattacctctgttcagagcaatcacttccagaagtgtttaggaaaatcaagtttcttttgtcttaagaatgccacagatatctagttcttaattccttttttttggggggggggcggtggggcttggggtggttgttactgtctctgactttgacaataagatttgtgtgttcacacaactcatcagagttggcgttctgcttgtgaatggaagagaatttctattacaccacacacttggggatttgtcagaaagcctctgagtttaaggggatttgctggctcaaggagtctcctgcttttatggaggcagcaagtgaaatgatacttggattaatgtcactttcatggtcccctctcccccctcccttccagctttttttagcttttcaaaaggaagagacacttttcaatcaggttattgaagatagacactgtggttgaaaaaaatatcacagtgtatccctgaagcagcagtttccacaccaggggaatggacaagcgtttccttggtttcactctggaggtgccatggcccttcttcctgggatttctattcatttaaaacactgctgaatgtactgacaggtaaagataggcaggctttggtttttctcctctcctctcctctcctctcctctcctctcctctcctctcctctcctctcctctcctctcctctcctccttttttttcttcttttcttgagacaaggtttctttgtgtagctctggctggcttggaacttgccctgtagaccaggctgtctatgaactcagagacccacctgcctctgtctactgagtgctgggatccgaggagtgtggcaccactgcttggaagctttctatggccttaactcgttaaattataactatcttggaaatatattgaaaactagaatcttttctctaggacaatgtatgtcatatgtgaaccatcaattttgagagcacttctttgttgggggagggatagaagtttatggaccttgtatagatcaatagactattgtagaatgtagatcagtcaacactatagaatgtagtgtcatccctgaatacagtggcaaaatgttgatacagggtcagatagtaaatatgtttggctttctgtttcaagggctttttgtgagtattgttgcagtatcttctcagctcttctgttgaaatttccatcagaaaacaatgcccaaatgaacaaccctggtgactgtgttacaaattaaacattctaaaaccaaggcaggggttgtctttagctcacaggccatggtttgctaacgcctgttgtagaccatcaaacacaacattctaattagttaactatatgaatggagttttcaactgcatatttggcttagctcctgaggtctattaggcagatgaatacaggagaataaagtcagaaaaagtgggggagattttagtactctgagtgttatttgttcacttctccaggtgtttattattctagagaatattctagatggagcagtttcctctgggttaagtgacactttccatgatctgttgttgacatcatgacttaggttagtctgggaaaggtgcattcttacatattacttgtagccgtggcagttagcttctttgcattttctttttctctgcagtggaatgtgcgtgcaagacgagtcacgaacccagacattaacttgtttgttgctctgtcttcagaactacagtggactcgtgagaccaaagctggcattaaaaatagaaggcatatgtaaaaggaaatctatgtctgtgtatgtgtgtgtgtgcatctctatgggtacatgtacgtgtggattggattcccctggagctggcattaccaggcattgtgttggttgatgtgggtgctgggaactaaacacaggtcctctgggggggggggatctgtaagtgctcttaactactaagccatctcttgatcctattttattttatttttatggtgtttttgagacaggatcttatgtatgccaggctgacctcaaacttgttatgtagttgaggatgaccttgaacttgcaaccctatgacctccgtctcccaagtgctgggatgctatgggtacatcatcacacctggtttttatgtggtgctgagaattgaacccagggctttatgcatattagacaatcaatcactctacccgctgggctgcactgccagttccactcttacccactgggctaaccagaggtgtgtccagcttacccatatacttgtttgtttccctaagagtagtactgaggtagtttagggttcaaagtcctctggtaagcagtgagtgtagaggctttctgttctcattgtgaacagactcatgctgaccacttgaattctgcctctgaacttgggtggggcactcctcttatggacccattagtacattgctgattcaagaggcctatacaaaatatcacctttctgaggtgatttctcttgggttgcaccacccccacccccctccgaatctcagagcctgcatccagaaagccatgtcattgtctgctgtgccagtctttgtacccttcgctctaagatggtggtcatccagagctttctgctatctcctttaccaccttcagaactggacatatttggaagttatagtgtctttattatctacatgatatccacgttatctgtatcatctacctctcagatcacacttagaatgatacacaatgactccttaagagggcctatccaaaagtttgatgaggtagtccatccatcgaaaagaatgtgttttgttttgttttgttttgtttcacctgggaaaacaaaacccgacttcaagaaccttcagaacacagctctcttttcacgggaagcatctcaccaccgaatccagagacgaccatttccctgaggctttgctcttgacagctatgcaaatatcagcctcccacagcaggatctgtggagacagggcattagttgatggttgtctttgcagttcctgatccagacttcacttttcaggcaaaactcccatggaaacatcttcctattcaaaatgaggaggagtctggtttaaaaagatacggaaatcaaggtcaaggactttgtggtggggaagttttgttttgttttgttttgttttgttttgttttgttttgtttgtgtctgaatgcaaatgtgctgatggaatttgtatatttcaggcattggagagatggctcaatgggaagagtgcatgatgttctcaacagccacatgggaaggctcccgactgcctctaactccccttccggggaatcgcatgctcttttctggactcctctggccctggcatgcatgtggtgcatacaacttatgcaaataaatacacacacgggttttttttttcctttttaaaaaagaaatctttaaaagaatttacatacacacagcctactattgggactctcagaaatttgtgaccataggcatcttcatgtgaacttggcaggtgtctcccacccccaatttttggaggttactttatagttataatttttgaggtttgcactgattttcttatagttggcagtatgggcagaattctgcttttgtgagcaatagcgtcaccatgccccttgccttcctgtagttgatacttgtgtctttctgagcttcagggtctcgttccacagatgactcttttgtgggatggagagcaaggacaagggcatgcactaacttgtccctgaagcggctcgctgcgtcatctgtagattaaggctgagaccaggcaccaaccatggttcaaatctttctttccttttgcatctcttgccactctccctctatatgtcatagatggcttggctgcattcctatgtgagtgctttcatgtatcgtaagtcaggaacagctctgcgacaaggagccctgtcgctctaagttcttaaaaatatcccagagaacctttagctagctcacaaaggagcaggtgtgcttctggcatattaaaatgtgctatattttggttgacccccctccccatatccctgttccccacccttgcttaagcccttctacccccagtcttttcccttctatttttatattatctgtttcctatcactgtctccatctctctaccttaaagcctcttttatttatttatttttttggtcctctcgtgtgcccgtctctaatttcctgacatctatacacactccctccctgattaatgcacacatatgaaaatgagaggccaggatgcacatctaagaggggatgtgagatctctctcttatcttattttcccaggttgtctcacttaatgttttctgagttccatccattttcctatacatttcattttttcactatggctgacccaaattccattcatatgagtaccacagttcattatctcttcaccagttgatggctgactccatgtccttactactgtgatcatagcagtgttaagcatggatgggcaggtacctctgtagaaggatgcagagtcctttgccaacccttatgctttaaaaaggagcaaccggacaagtcattcagttcccttaggaaatgcttatcagcacccgtccttacatcctgtgcactttacgggagacacatttcatttgtaaccatgattgtttctttccctatgtcacaagtcaactttatttgcaaaccaccgtgtgtattctgaaggaagctcttggggtcaaagcaaatatgacttgatgcaagattgagatcacgtggacgactgttcttggtaccccccccccaaaaaaaatttatgaaagaagatactagagagatgtccgcctctgcctcagaactcccaattccagcccccttaaacttcatgtgtggaacgtttagaagatgaggccatgccgggcatccccctgtagacgccatctgtgctgcctgtgccctctgcttctgaccgtcctgggctagaatcgtttttctctctgtgggttctaggatctttttctttacaaaggaggcaggctgagtcgcagaatatggaattcattcagacttttgtgcaggaagggcctcctggaaccttccaaagcctttgaggtgagtgttagatttaagtcctggccctccattttcatttatgatatacaagagtgaaggagctgtggaggtaggcttcaccttgtgttttccttgatggagacagacagggctgattttttttcccccacactagaaacatcccttatcactccatggtgaaaggaaggtgggatatcaagtaatggcttctgtagagccttggaattgtgtgttccaaacgcccattttgttgttcagctactatgctttgcctctcgtctgaggtggactcatattcttatgttagctgagctttcttctcatccaagttgaacagggtggttaggtttttttgtttttgttttttgtttgtttgtttttgttttgctttagtttaacagcttgttgaaactggcaataatatctcaaaatcaaggcaatcagtagttcatgtgtagaacttcaggtagatacatacattgatgttgatagatgatagatgatagatgttaacaaaacttccaggagtgtgcccagacgaagggtgatgtggccttaaagacagcatgcatgtttgtaacatttggagtagcccaaaagcctgggtcctcttctggagaaatccacatttcactgcaaatgccatcgataaggggtgtgtaatagcctgggtgactgactggcttctgtcagttgtcaagcccaggaataatttgccaaagttgaggtgttttgtcttatgtaaaggccatggtgtggtggaattcctatcaccaggtcttgtaaaatgtggaacatcattgtcccctttatgatctaagagcgtatgaagtgtatgtatgtttttgaaatgctatgacggatttcttggaatccatgcatttggccaagagaatggcagagatgttaggccaatggttgttatgtggctggctctcccagctcctccctcaccacctcaaaaaagagaataaacagagaggcgaagttaaacttgaatttctgtgctatgaaggagcgtccactctaatctcccatctcaggatgttcttcagttccgcactggtgccacagaggatagcttgagctgctgacattgtaacttttccttggatgagtgtgtctctgtgtgtgcgtgtgtgtctgtgtgtgtgtgtgtgtgtgtaaaatttccaaccctgcgtgtcgtgttcattgtcttgtcgatttgtgaactgactcgaacagtggaggagacagttaaaagggaggaaagcgactgcctaaccacttcgctctatcaaaagtgctaaccgtgcttccatagctgggacaaataatgtcagcattcaggagggatgcccttgaatgaaatggtgtgttatctcctaagaaaatgtatgactaataaaagacattttaaaaagtacagtgggtcagaataatccttgagttgctcctgagatgtgctctcttggcatgctgtcctcaggaaatgatctggtggactgcagacatagctcagggttagggcccctgtctaggctgaccaaggcactggctatgagccacggcaagaaaaaagccaaaccctgaggtaaaaagtattgcctgcatgctttaacacccacggcacccccattcttcttctgatctgtagtttgatttttgtttctctgattattaccatggccaaaagctttgtaaagaaggaaaaaccttatttggcttatacttccagtcatagtctgtcatctaaagaaatcagggatgggatctaaggcagaaacatggagaaactctgcttactggcttgctcactggcacacgcttggatggctttcttatacagcctaagaccacctgcctagggaatggtgccacccacagtgagctaggctcttgcacatcaatcatcaatcaatctctcacatatatggccacacaccaatctgatctctgaaattcatcaattaatgttatctctttttagatgacactaggttctgtcaagttgacaataaaaattaaccaggacccccctcccccaccacactccctaagcagaacagaacagaacagaacatggctacacaatagaggaaagaaaacttcccatttc

SEQ ID NO: 265 - DNA, 1826 bp, Mus musculus
tggacagaatttttgctgctgctgtggaacttacgctcttgaggggaagacagacagacagcaagaagcgaaacccgggccttaagattccaaaagaagcgtttgaacagcctcagaccagttccacgccgcctcgggatttagactccaaggcttgcatatctattggaaaccagaactttgaggtgaaggcagatgacctggagccgatagtggagctgggacgaggtgcgtacggggtggtggagaagatgcgtcacgtgcccagcgagcagatcatggcagtgaagcggatacgggccacagttaatagccaggaacagaaacggctgctgatggatttggatgtttccatgaggacggtggactgtccattcaccgtgaccttctacggtgcactcttccgggagggcgatgtgtggatctgcatggagctcatggatacgtcactagataaattctacaagcaagttattgataaaggccaaacaattccagaggatatcttaggaaagatagcagtttctattgtaaaagcgttagaacatttacacagtaagctgtctgttatccatcgagacgtcaagccttctaatgtgctcattaacacactgggccaggtgaagatgtgtgactttggaatcagtggctacctggtcgactctgttgctaaaacgatcgatgccggttgcaaaccatacatggctcctgaacgaataaatccagagctcaaccagaaggggtacagtgtgaagtctgacatttggagcctgggcatcaccatgatcgagctggccatccttcggtttccttatgattcttggggaacgcccttccagcagctaaagcaggtggtcgaagagccctctcctcagctcccagcagacaagttctccgcggactttgttgactttacctcacagtgcttgaagaaaaattccaaagaacggcccacatatccagagcttatgcaacatccatttttcaccgtacatgaatccaaagcagcagacgtggcatcttttgtaaaactgatacttggggactaaaaagccatggacttaactggtcgaccctactgtggattggtgggtttacagggtgaagaaagttcactacagagccaacagaaagtcatcttgaggtcattgaaccctgcctttctgaggggtttcctctccccgtttttctttttcctctccaaagggggccttggaatctctagcgtaggctgaactctctagatggatgaaatacaacaaaggcttaggacttgaaatggtgattaaatatttaatggcaagtcatacgggtgggtcctcgagcttctcagatctctcgtgttctttacgaaatgaatgcaattggccctggtaacaaggtgctacagtagtgaagagattgtgaagtagatttgtagcgtatcccacttattattttaatatttatgtttcagtgcttggttggaaatattccattttatgcaagaagggagatacagagacagggctgactcggcagtatttatagggcttttatttttttgagttcaatcatgtctgtggtccagaggaagttatttaatatgcatttttaaggatattataaaaatctccagcaaaggggctcttcctgtacagtgtggcttgcagctctcatggctgctgctcccgactgtcaactcaaccgtggctgatcatcgcatcgtttgaatgaactgtcaaagttaatgtccccccgcctccctcccccaactttggaaaccatgaaagtcacttgtatcacggctcaaagagtaaaaaaatacaatggttctcttcaaattt

SEQ ID NO: 266 - protein, 348 aa, Mus musculus
DRIFAAAVELTLLRGRQTDSKKRNPGLKIPKEAFEQPQTSSTPPRDLDSKACISIGNQNFEVKADDLEPIVELGRGAYGVVEKMRHVPSEQIMAVKRIRATVNSQEQKRLLMDLDVSMRTVDCPFTVTFYGALFREGDVWICMELMDTSLDKFYKQVIDKGQTIPEDILGKIAVSIVKALEHLHSKLSVIHRDVKPSNVLINTLGQVKMCDFGISGYLVDSVAKTIDAGCKPYMAPERINPELNQKGYSVKSDIWSLGITMIELAILRFPYDSWGTPFQQLKQVVEEPSPQLPADKFSADFVDFTSQCLKKNSKERPTYPELMQHPFFTVHESKAADVASFVKLILGD

SEQ ID NO: 267 - DNA, 2123 bp, Mus musculus
tcagttccaagtttggagcttttagctgccagccctggcccatcatgtagctgcagcacagccttccctaacgttgcaactgggggaaaaatcactttctagactgttttgcaaggtgtgcaattccaccttgactccctgaaagtccatctgctgcatcggtcaagagaaactccacttgcatgaagattgcacgcctgcagcttgcatctttgttgcaaaactagctacagaagagaagcaaggcaaagtcttttgtgctcccctcccccatcaaaggaaaggggaaaatgtctcagtcgaaaggcaagaagcgaaacccgggccttaagattccaaaagaagcgtttgaacagcctcagaccagttccacgccgcctcgggatttagactccaaggcttgcatatctattggaaaccagaactttgaggtgaaggcagatgacctggagccgatagtggagctgggacgaggtgcgtacggggtggtggagaagatgcgtcacgtgcccagcgagcagatcatggcagtgaagcggatacgggccacagttaatagccaggaacagaaacggctgctgatggatttggatgtttccatgaggacggtggactgtccattcaccgtgaccttctacggtgcactcttccgggagggcgatgtgtggatctgcatggagctcatggatacgtcactagataaattctacaagcaagttattgataaaggccaaacaattccagaggatatcttaggaaagatagcagtttctattgtaaaagcgttagaacatttacacagtaagctgtctgttatccatcgagacgtcaagccttctaatgtgctcattaacacactgggccaggtgaagatgtgtgactttggaatcagtggctacctggtcgactctgttgctaaaacgatcgatgccggttgcaaaccatacatggctcctgaacgaataaatccagagctcaaccagaaggggtacagtgtgaagtctgacatttggagcctgggcatcaccatgatcgagctggccatccttcggtttccttatgattcttggggaacgcccttccagcagctaaagcaggtggtcgaagagccctctcctcagctcccagcagacaagttctccgcggactttgttgactttacctcacagtgcttgaagaaaaattccaaagaacggcccacatatccagagcttatgcaacatccatttttcaccgtacatgaatccaaagcagcagacgtggcatcttttgtaaaactgatacttggggactaaaaagccatggacttaactggtcgaccctactgtggattggtgggtttacagggtgaagaaagttcactacagagccaacagaaagtcatcttgaggtcattgaaccctgcctttctgaggggtttcctctccccgtttttctttttcctctccaaagggggccttggaatctctagcgtaggctgaactctctagatggatgaaatacaacaaaggcttaggacttgaaatggtgattaaatatttaatggcaagtcatacgggtgggtcctcgagcttctcagatctctcgtgttctttacgaaatgaatgcaattggccctggtaacaaggtgctacagtagtgaagagattgtgaagtagatttgtagcgtatcccacttattattttaatatttatgtttcagtgcttggttggaaatattccattttatgcaagaagggagatacagagacagggctgactcggcagtatttatagggcttttatttttttgagttcaatcatgtctgtggtccagaggaagttatttaatatgcatttttaaggatattataaaaatctccagcaaaggggctcttcctgtacagtgtggcttgcagctctcatggctgctgctcccgactgtcaactcaaccgtggctgatcatcgcatcgtttgaatgaactgtcaaagttaatgtccccccgcctccctcccccaactttggaaaccatgaaagtcacttgtatcacggctcaaagagtaaaaaaatacaatggttctcttcaaatttgtggcatagtattagtggaaaaatgaaaataacagaaagtgatgtgctttt

SEQ ID NO: 268 - protein, 334 aa, Mus musculus
MSQSKGKKRNPGLKIPKEAFEQPQTSSTPPRDLDSKACISIGNQNFEVKADDLEPIVELGRGAYGVVEKMRHVPSEQIMAVKRIRATVNSQEQKRLLMDLDVSMRTVDCPFTVTFYGALFREGDVWICMELMDTSLDKFYKQVIDKGQTIPEDILGKIAVSIVKALEHLHSKLSVIHRDVKPSNVLINTLGQVKMCDFGISGYLVDSVAKTIDAGCKPYMAPERINPELNQKGYSVKSDIWSLGITMIELAILRFPYDSWGTPFQQLKQVVEEPSPQLPADKFSADFVDFTSQCLKKNSKERPTYPELMQHPFFTVHESKAADVASFVKLILGD

SEQ ID NO: 269 - DNA, 2163 bp, Mus musculus
tgccctgaaataaacacagctggaaagcgaccacctattgtttttctttctgttaggaaatgaaagagctatttatcaaaagcactgggctcccatttataactgctgggctggttaatgatcaatgccacccctgggtgtctgaatgggcatgctaaccttctgcctccctgagtggcttccactgccctggaacaatgaactctgtggagttttgctaccgcacaagagcaggaggcggagcctgcttttttttttttttttttgcctccagctgaagcgtgccggctttggagcttagcaaaggatggcttctgctgggattccttctgccagctttgcagtttgcagctttgcaggcctcctggaagccaacgaagcttctggagatggtcaagcaagaagcgaaacccgggccttaagattccaaaagaagcgtttgaacagcctcagaccagttccacgccgcctcgggatttagactccaaggcttgcatatctattggaaaccagaactttgaggtgaaggcagatgacctggagccgatagtggagctgggacgaggtgcgtacggggtggtggagaagatgcgtcacgtgcccagcgagcagatcatggcagtgaagcggatacgggccacagttaatagccaggaacagaaacggctgctgatggatttggatgtttccatgaggacggtggactgtccattcaccgtgaccttctacggtgcactcttccgggagggcgatgtgtggatctgcatggagctcatggatacgtcactagataaattctacaagcaagttattgataaaggccaaacaattccagaggatatcttaggaaagatagcagtttctattgtaaaagcgttagaacatttacacagtaagctgtctgttatccatcgagacgtcaagccttctaatgtgctcattaacacactgggccaggtgaagatgtgtgactttggaatcagtggctacctggtcgactctgttgctaaaacgatcgatgccggttgcaaaccatacatggctcctgaacgaataaatccagagctcaaccagaaggggtacagtgtgaagtctgacatttggagcctgggcatcaccatgatcgagctggccatccttcggtttccttatgattcttggggaacgcccttccagcagctaaagcaggtggtcgaagagccctctcctcagctcccagcagacaagttctccgcggactttgttgactttacctcacagtgcttgaagaaaaattccaaagaacggcccacatatccagagcttatgcaacatccatttttcaccgtacatgaatccaaagcagcagacgtggcatcttttgtaaaactgatacttggggactaaaaagccatggacttaactggtcgaccctactgtggattggtgggtttacagggtgaagaaagttcactacagagccaacagaaagtcatcttgaggtcattgaaccctgcctttctgaggggtttcctctccccgtttttctttttcctctccaaagggggccttggaatctctagcgtaggctgaactctctagatggatgaaatacaacaaaggcttaggacttgaaatggtgattaaatatttaatggcaagtcatacgggtgggtcctcgagcttctcagatctctcgtgttctttacgaaatgaatgcaattggccctggtaacaaggtgctacagtagtgaagagattgtgaagtagatttgtagcgtatcccacttattattttaatatttatgtttcagtgcttggttggaaatattccattttatgcaagaagggagatacagagacagggctgactcggcagtatttatagggcttttatttttttgagttcaatcatgtctgtggtccagaggaagttatttaatatgcatttttaaggatattataaaaatctccagcaaaggggctcttcctgtacagtgtggcttgcagctctcatggctgctgctcccgactgtcaactcaaccgtggctgatcatcgcatcgtttgaatgaactgtcaaagttaatgtccccccgcctccctcccccaactttggaaaccatgaaagtcacttgtatcacggctcaaagagtaaaaaaatacaatggttctcttcaaattt

SEQ ID NO: 270 - protein, 394 aa, Mus musculus
TLWSFATAQEQEAEPAFFFFFLPPAEACRLWSLAKDGFCWDSFCQLCSLQLCRPPGSQRSFWRWSSKKRNPGLKIPKEAFEQPQTSSTPPRDLDSKACISIGNQNFEVKADDLEPIVELGRGAYGVVEKMRHVPSEQIMAVKRIRATVNSQEQKRLLMDLDVSMRTVDCPFTVTFYGALFREGDVWICMELMDTSLDKFYKQVIDKGQTIPEDILGKIAVSIVKALEHLHSKLSVIHRDVKPSNVLINTLGQVKMCDFGISGYLVDSVAKTIDAGCKPYMAPERINPELNQKGYSVKSDIWSLGITMIELAILRFPYDSWGTPFQQLKQVVEEPSPQLPADKFSADFVDFTSQCLKKNSKERPTYPELMQHPFFTVHESKAADVASFVKLILGD

SEQ ID NO: 271 - DNA, 149351 bp, Homo sapiens
gaattttaagcttctctgaccagaaatcatacttttacatttttgtaacctataccctatcattattgtaagtcttaagaaaaggcttaagacttaagacttaaaaaatgaaatataataaactgaggtgtttccctcttatttcttttggtccctgagattaaaaagcagatttgtgagatatgtcttttacagctggcatttcttaggctgaattctatattttgatttttcctagtccttctctaaatacatagaccgactacttaaatgtaccaggacttggacatcctgagagataggtaagaaaagtaaaataggtggaaattcagatatatactcaaggaaaactgagaaatccttttgtctgtttataaaattttatttatttattttattaacttttttttttttttttaaatagagacagggtctcgccatgttgcccaggctggtcttgaatccctgggctcaagcaatccttccacctcgatctcccaaagtgttgggatcacagacatgagctaccacacctggccaatccttttttcttatgttgcaagattcatgacttatgacgcatttgtcagtaactcgagtttatggaaacatgcagtcaagaccagtttgtaaagcagggatctacacatttatcctgtaaaggaccagacagtaaatattttagacttcaggggccggatgctctctgttgctaatattcaactctggggaaacacaaaaatagccatagacaatacttaaatggatgggcatagctgtgtttcaataaaactttacttatggcagggcgtggtggctcatgcctgtgatcccagcactttgggaggccaaggcgggtagatcagctgagatcaggagatcgaggccagcctggccaagatggtgaaaccctgtctctactaaaaatacaaaaattagctgggcatggtggtgggcacctgtagtcccagctacttggggggctgaggcaggagaatcgcttgaacctgggaggccgaggttgcagcaagctaagatcgtgccattgcactccagcctgggtgacagagcaagactaaaaaacaaacaaataaacaaacaaaaaaaactaaaaacaaaaacaaaaacaaaaaagcctttacttataataagagccagtgggctggatttggaccataggccacaatttgacaaccctcattctaaaggaattctctctgctctctccataacttaataaatgttcactacacacccctcatgtcactgggcatccatcgatcaccctgagccctctgtagcatattacctttgaaagctgaagcggtagccacagtgaggttcttcaattctttacgtttgaaaaagaaaatacagtataaacacgagattatgaagacatcctctcggggagaagtgataaagtgagaaactaggactctgggtgaccaatgtgcaattctttctcaatgaccccatacaagacaagccagtaattagttaaatatgaaattgattaggtgagttccaaaggagttccgaatctaagtgtaactgaaactttacacagagagcacagccatttatttggctttctgtagagctctggtgtcttcagattttctgaagccaggcagggcaggacaggcagaaaatgagtgagtgtggtaagaaagagaaaaatatacacagatgtgtgatatgtatatatatatatatccagatatatatatccatatatatatccagatatatatatccatatatatatccagatatatatatccatatatatatccagatatatatccagatatatccatatatatatccatatatatatccatatatatatccatatatatatccatatatatatccatatatatatagatatatatatagttggctctccatatacaaggattcaaccaactgtggatcaaaaatactcagaaaaaatttccacctggactgaacatgtacagacttttttttcttgtcagtattctctaagcaatatagtctaacaactattaacatagcatttacattgtattaggtactatacataatctagagatgatttaatgtatatgggaatatgtgtgtaggttacatgcaaatactatgtcattttgcatcagagatcaatggattttggtatttgagggaggccatggaaccaaacccgtggataccaagggacaactgtatcaggaaagagaaattgattgattagggtagaagagaaaaatatatgctgtttgtgagattagacaccattccaattttctctcttaacagaacttgaaattttttgtgtgccctgtattactcaatctaatgattcagcgtagttcactacttgccagtgctttaatacacagatgatatgctgacacttttaaagggtgaatgctaggctggaataatgtctattcttactttcccagaacctacatcttgttgtcaattggctcatgctaacatgcctgtccaagatgcaatgtggtttggaggaaaagtatgtaacagcatcacactggggctctaaatggctatttaattactaagaaatgttgaacattcagtttatacattttttaattcaatgagaatgtcatccaataaggactctagatagttcgttggcatttccataagatatattaggcactgttaattataaagatttgttgacagtaatttgaaaatctagaatcttaatacgagtttcaggaaagtattagccaaaatgtttttaatgagataattaaataaaaattcttaggccgggtgtggtggctcacgcatgtaatccagcactttgggaggccgaggcgggtggatcatgaggtcaagagatctggaccatcctggtcaatatggtgaaacactgtatctactaaaaatacaaaaaaattagctgggtgtgatggcacgcacatgtagtcccagctactcgggaggctgaggcaggagaatcgcttgaacccaggaggcagaggttgcagtgagctgagatcacactactgcactccagcctggcgacagagcaagactccatctcaaaaaaaaaaaaaaaagaaattcttcttcttagcaaatctttatgctggtgtttctttaacttttaacaaagaaggctaagataagctaacagataatcaacctattttagatgaattcattcagtagataataaatccatgcaaacatcagataaacaaatattggttgagcacatattatatgcatgacaaatgccagacctggggctacatgatgttgatgaaactgtccctgcttaagcttagagtcaagggccaaatacagacaagcaaggtcttcccaaaggagtaggttaggaaggtgcagggaacacaccattttgtagaaaaggtaaaatttgtagttaagtaatgttactgagagataatatcagatatatggcgcataagagctaatagatgccaccagaatttaaaagggtggatactctttaatgggacagagggatgtgatcaaggacatcttcatggaagagatgagctagaacctcaaatgaagaacagagtttagaaaacagagatggcagtggaggccagaaaaaggcaaagtcatagaacaaagtcattggacagtatgcactaaggtatagaagtggtgccatgtcaattcatggctcattgggataagtaatcctgtttggactggattgcttaaacaaaggaatcctatggtggatgaatgagacataaggctaaacagctatagccagccatattgtaagttgaatcacactgagatttctagaatttctgctggtaatcatagttcattgtgacactttagtgcagtaaaaaaaaaacaaaactgtacttaaaaatattttaccatcacaacttgccatccagtcccttaaatgaatcctccacctgcttctcccccatatacttcactatatataacacacctgtatatgcaatgattttctagggtctggaaaagtagatatttagacttgagttcttagcttgaactttggtagcttcctttctcttgtttctgacatctagtagacactgttggaaaacattcataaatgtcacgtgcagatttgtattactactttgaaggcagtatttcaaatggtaatataagtatttcttgtctcatctttttttttttttttttttgagacggagtctctctctgtcacccaggctggagtgcagtggcccaatcttggctcactgcaagctctgcctcccgggttcatgccattctcctgcctcagcctcctgagtagctgggactacaggagcccaccaccatgcctggctaatttttctgtattttcagtagagacagagtttcaccgtgttagtcagtatggtcttgatcttctgacctcatgatctgccggcctcggcctcccgaagtgctgggattacaggcgtgagccaccacgcctggcctgtctcatctcttaagagacgttgttatgagagtcatcagtggcttgccaaagcaagggatcaggaagatgtttagccagtgtataaaatagaatgtgtgatcacaattcccttctctctttaaatcattgtggttttaatcaaacaggtgagttgggtttagagacatggaatattaaaactggaagaggccttagtctgagtctccttattttatagtggaactaaaagaggcccagaaaggtaaaatgacttgccttaggagacacagctaactttttctacagccggaattagaatccagatctcttagattctagtgtttttcctatgtcaaaatatcccattactaaatctcattagctttaaattaacttaaaagtagagcatttaggccagaccaggtggttcatgcctgtaatcccagcactttgggaggctgaggcgggcggatcacctgaggtcagaagttcgagactagcctggccagcatgtgaaaccccgtctgtactaaaaatacaaaataagctgggcatggtggtgcacacctataatcccaactattcgggaggctgaggcagcagaattacttgaacttgggatgcggaggttgcagtgagctgagactgcaccactgcactccagcctgggcaaaaagagtgaagctccatctcaaaaaagaaaaaagaagagcatctagtaactttccatggtatgtagcagggtttctcaaactcacactattgacatctggaccagataattctttgttgtggggctttctgtatgctatagtatgattaccagtatccctgtataccaatatacccattagatcccagtatcacactctctccccctattgtgataacccaaaatatttccagacttgccaaacatctcttgggaggcaagattacccccagttgagaaacactgatattcagctattaagtcacaagtactgttcctggcctgtggaatatatgtgacacctccccgacctcctcctccctgcatatgcctctagaataattccttcagatgccagtctgacctaacctaaaggcctccctccaaggatctcacacctcgaacctgacagcacaaggctctttccaggcgaggtgctcaggtttccctgccagtggtaactaccttgttggaatccagggtgatgtgttacagagggtggctgagaaagtccaaaggacgtgcccgctgagtcttcaaggacaagtcagaaggaactaggaagaaaatggaaaagtcttgctagacagagagcatgtaccaggctgagggcggcggctcacgcctgcaatcccagcactttgcgaggctgaggggggtggatcacttgaggtcaggagttaaagaccagcctggccaacatggtgaaaccctttctctactaaaaatacaaaaattagctggatgtggtggtgcacacctgtaatcccagctactcaggaggttgaggcaggagaattgcttgaacctgggaggtggaggttgcagtgagcaaagatcatgccattgcaacagagcaagactgtctcaaaaaaaaaaaaaaaaaaaaagagagagagagcgagcatgagagcatgtacctaatggcaaggagtgagaaaagctgccttctcctgactctaatgtcaacatacgatgagaaatgaagctggagataaagcagggcccaggtcttgaggaaccaattataccatgccatggagtttggaatagatcctgagtatatttagaaactgagaggagagtgcatctgacttgcattttagaaagatctgaagtacagaaaattacaaagattggtgcctgtaatcccagcacttttggaggctgaggcagaaggattgcttgaagccaggactttgagaccagcctgggcaacgcagcaactctgtctctacaataaaaaataacaaaaattagctgggcatggtagctcacgcttgcagtcccagctacttgggagactgaggtgggaggatctcttgagcccaggagtttgaggctacagtgacctatatgatcaggccactgcactccagcttggaagacaaagcaagacccttgtccctaaaaacaaacaaacaaacatagctgggcttggtggcatgcacctataatccctgctactctggaggttgaggtgggagaatctgggaggtggaggctgcagtgagctgagatcatgacactgcactccaggctgggcgacagagtgagactctgtctcaaaaaattaaaaaaaaaaataaaaacaaacaaacaattaaaaagatgggggaggccaggcgcggtggttcacgtctgtaatcccaacactttgcaaagccaaggtgggtggatcacttggggtcaggagtttgagaccccctgaccaacacggtgaaacactgtctctattacaaatgcaaaaattagctgggtgttgtggtgagctcctgtaacatcagccattcgggaggctaaggcaggagaatcgcttgaacctgaggggtggaggttgcagggagccgagattgcgccactgcactacagcctgggtgacagagcgaggactcatctcaaaaaaaaaaaaaaaaaaaaaaaaaaaaaagatgggggatttaaaacagaagcatgggccacctgaagatgaacacttgatgtgcatataaaaggagacacctgccagaattcactcctgccttcttacgccacaatggggaggattctcctcctagtaccaatgataccacgaagactggcaggaagaagagcacaggtacctcctcttccaccacccacgtatgtgggagaggaaacttttgaacaccaaggcaggaagaagaactttttcttctgggaaccaagacttcacagagaggttgagttccctgtcatcccaatttcctacttgaaattcaggatacatttttcccagaaagaaatatgatacaaaattttgctatttttaaacggatgattcagccaatttatggatgagaggtgttttgtgtatgcatgtgtgcttgtgtgtgtatattagctgctgaacatattgttggtgctatgggaaaatgaattgcagattgactttcaagctacaatccatttgccagctgtggactccgcacgcctatgcagagaaagtaagagcagtaatgacagtggcaaaatgcaccagacaagttgtgattagaactcttccataaagaagggagtctggggctacttaagagcaatgcagctgaccacataaaatgcaaattgaagcaagctctaggtggctgttcaggccctgcctgggctaagccagtttacagaaagctccagcagctatcccagggcctggctccatcagtgtttgggaaagtgaactagattttcacacgtgtctcctggttaaatgagacttaggaaaccatgctggtttgagggggtgctgagcttgtgtgtatacgataggagggaagggacaacatggattagcctagaaggacaataaaagagttagaaagtccttgcacctgtgttcacagaccagcaatgccttcctcttaggggcagaagctaatatggagattagattgccttcactaattgtcaagaatgtcagtaaaggggaccaacttaagtaaattaatgttagtctcacaacctattgcatatttaagatttgatttgctggtttgcagctgaaataagacggcttccttccctctaatgcatcccttatgcagatggtcctggcttccagcatcctaaatacaattccaatagttttcattagtaatcatcaaatctagctgaatcttctttcaaagtgcctctttttgcctttcactactgacctaacctatctctagcctctcccagttccaacccaccttgattgctgagggcaaatttactttcttaaaacaatgcttggattaagttacgcccctttgcaagaccctttcacctccccgcaagtacctgcagaataaagtccaaacctctagcccaccttttaaggccctgtggagtcctcacctgtaaatctcccccgccctcaccactcctgcacacaaggcaacaaggtctccttggcagcttctgagtaaggttgtccttatttctgccacagtgctttgtccacacctccttgaattcctcaattcctccctctgtcttaaaagaacatttctgagtctgtctgctccatgaagtataagtccgagctcatttttgcccatgccctgctcactcctctccattccttgcagtgaattgtgctaagcatctctggcttccttgtgaaaaaggtgatgccgttctccatcagggtgctgtgtacccactatgtgtgagcggtacagaatgaatgaacatcccagggccctagaaaggcgcctggcacatcctggacactcaacaagtatcttttaattttaatgaataaattcaagatattcgactgtattcattttccacccactttccccctaggccagggactctcctcccaggtgagaaaaaatcatctagataccttaattttgataaagttagcgttgatgtataaaaagcagaacttcctctgtaaccctgtgagaaatgagaagcctccaatcttcttccccacacctaccccctactgagtttcgggttccttggaaataactgacctggattgtttctgacaaaataaaactttgcatcttctccacagagcaaaggtaaccttacctccagccaacccaatcatccatacatttttcttactagaaaaaatgtttttaaaaatggaggtgtggccgggcgcggtggctcacgcctgtaatcccagcactttgggaggccgaggtgggcggatcataaggtcaggagttcgagaccagcctggctaaatgttgacaccccgtctctactaaaaattagccgggcgtggtggcgcatacctgtaatcccagctacttgggaggctaaggcaggagaattgcttgaacccgggaggcggaggttgcagtgagcagagatcgcgccactgcactccagcctgggcgacagagcgagactccctctcgggaaaaaaacaacaacaacaacaacaaaaaaacccccaaacaaacaaaaaacggaggtgtgagggtaaaacgtctacaggcaagaacagcacaacaggtgctgagctgcaaaatcaacacactaaactcccaaacagaccttctcgacaagccaaaagctctttagctaacctaatattctttagctgttgtttcagaggcttttcgagaacaaaactgccgccccgtcttggccttgccgcttttcacccatcactctactgagtgtgtgtctgacttgtttatctggacgcaatctttgtcgcacccagttatctcgctcagcgaccggggcgaccacgtttccttaaatcagagccccgtggactccgccggagaactacattacccagcggccttcgcgcccttcgcaggaaggacgtctgcgcactaagatactcagttccaagtttggagcttttagctgccagccctggcccatcatgtagctgcagcacagccttccctaacgttgcaactgggggaaaaatcactttccagtctgttttgcaaggtgtgcatttccatcttgattccctgaaagtccatctgctgcatcggtcaagagaaactccacttgcatgaagattgcacgcctgcagcttgcatctttgttgcaaaactagctacagaagagaagcaaggcaaagtcttttgtgctcccctcccccatcaaaggaaaggggaaaatgtctcagtcgaaaggtaagaggctgtttgcattagttgcaaaaatgcaaagggttgtgcatgcatttatgaatgcatggatgcaattttcgcctggcgagtgcatttttaagtttgaggttttccacagctcagttgcatttcctgtttagtatgtgtctttttttgcagacacagagagttcctgtaaggcagggcttgcagttcagctgtgcattgacgttatttgcattcttctgctaggattactgagctctttttgccttttgcacagtcaggagagacagagcaggttggtagcgtctaaatgtgcaaggctttatataattgtaaaattctttactatgcacagatattgtaagtaattttgtatgcaacaggaatagaaacttttaaaaactctataggtgaagatgaaaggtaaaacttgagttaaactactaggaaattaatgtaatcttatattctttgggggaaatagaccgttgcggtgccagtatttagctaaatttccattgatatcgccttgaacattaggtaacttttgatttttaaaggaagtaaaggtgaagggtgaataacagcatatcacaaaaaagcagacgagtcttgctcttctgagattttgcactttacaccaattgcttattggctcgcaaaatttagaagcagcagtgaagacctaatgttttatgtctgcccatttgggggatgctttgcatcttgggggaaaatattgggggtaaaactgtacttttaagcattacagtagtgtgaagggactgcactgtttcattgacaagcataatgaaatattttaagtgtgtaactgcgtgtatttagtcagctgtaataggttggaagttcacgttatggttgttttctttatgttcttttattttcttttcttaatttttgtttttaaacacagttgtattttgcaggcttaatgtcaccctgggaaggggatttaaaaaattcctgatatgacatcaaagagcagactaggtgctgtcaggtgcccctgggaccccaaatcacttgtttcagaacaattgtttctttaccatggagaaagcatatgccatatgagaagtatgggatgatgaagagaggtgttagatactattgaattaggctacccggggcactctttgagtaagacatggtgaaattaaagggtctaacaagctttttgctacttttttgggagggagtgtggggagttgttgcactgctttttaattctacctgatgggagtcatatatctcagcagcccaagaaggaagtagtaatctcaagcattcaaagtagcactctgcttttctttgagtattaggggagaatggaaatctgaaaagttaagagtgctgaagaacctaggaattgacatatcaggtggagatgttcctcaagtggggaaaacctaaaaatctccttattgagtagagaaataatagttcagaagaggcagtccatgctttgatgtattaaagagatggcctttagttactttgtatttggtaaacattcgctcattcattcaattcagtttaatatatgtgtaatatattgtgatatgcatgtatatacatatgtatgtgtgtatatatatgcatgtatatgtatgtattgtgtgtgtatgtgtgcacatgatttagggacacacaaaaatatttaaaatgaagtttttccttcgggttggtgaaaacaagaatgtaaggaaatcattataatacaagataataggacaggtattgaagagaaatggtgctattggagtttaaaaatggaagtgatttatctatttgggggatagtcaggaaggtttatgaagaaggtggtgtttactgtgatcttatctttggactttagggtctaaactaaatcaggctcctttttgcatatttttgggctcactatgaacgtggctccctcttagtagagccagtttttgagttgagaagccaaaggagatattagcactgtactcttccctatggatgtgtttacaatggatcaggtactggtggtccttcaaatcaattcccatttacccagatgagttttcttaattggattctgcttggaaagtacatctggaatgaacatggggttcttgtccgaaaggaaaattattggtagaaagaagtgggtgatcattttagaaatggcaaaagagccagccgccttggcctggactttaaatgtggaattggccttattcagctacgctattctcaaatggccaaaatactttttgcagtaccaaactccttttttaatattctaacccaagaaatgggaggaaaagtgaaaagtggatacaatctcatagtattgaagaatttaacaacatgttcaattcaaggacctttacgaactttctagatcactataattcggtttaacagacctctaatttaaggcacagcagaggcaaaggaattacagactctctggaagctggaaggactgggttactgctctacagccttaccaacagtgagattccgagaaagaatttcttaaaaagaaattttgttttccacagttgtaactttaggtggtatgcttttcagcttgtttatattagctgtctggggttgagttgacatttttcaaatattaaagcagtagaatgccttttgaggaaatctgaaatgtaagttaacaggaagggcacccagaaagtgcaggaattcctgcacactacaggaagacaagctacaggaaaaatgtgtcatctacactacccgggagagaaaaactattgttatcagccataatgatctccggagggagggagagaaagagggaggtagggagatctggcatcccccagttcacctgaaaatacacaaaaagtttgaccctgttaaaatacacttttctcacttctcctcctattcacctttaaaaaatattagtttattttagttttagagagcaataagtaaatcatgtaagaaatgcctatgaggcacaattcagaagcatatagcagagtggtaggaaaggtcttaactctactggggttctttgcttctgtaattcattccacccttgggaaatgaaatgtgtaaatttcttgttctctataaattcctttgttaggttgtaccagacggacttgtcatgcttagcctgtaatctgagccagtatgttttataaccccgtacatctcaggacacaaaatcagaataggtagcttgggtttcctgagcttgctttgtattagcattgcattcagttctttagagcatgcggcctgttaactgtagggggcttcaggggtctctggttggtaaatttaatgttggagaaaagagttgagattctcttgtctttgtttttcagattagtgttactttaatgactccccagtattttaaaatctgaaagatctacaaggaatatttttaaaacttaaaagaaatttcataaataacccttgttcattatagaaacatttcatagaaaaggaaaaataagaatgactagttactgcagtctacactttggcatttattctcttggacttttttttctatctatgtgtatgaagcatccaaaatgtgtgtaaaactaagtctatttcgttccctcttgtttcacttaccaatatatggcaaaatattcccaagtttatatatttctacattcatagtatcctcttccattgtatttatttaaatagaatcttaatgtttattaactttcactattgtgaatatttccgtgatgatcataccagttcctacattatcatgcatactatgcccttagattaaattccagggagcaaaaccacaggctttgaatgtccagttcttcttcactctccattctcttttcttccttctgaaaatagctttttattattgcaaaaaaaaaaatgacatatgctaatcaaaacattcaaaccaaagataaattcacaataagaatataaaactcactcaaagtcataccacccagagctaattactgttagttttttgggtactatctccatatttgtatgtacatgttattttacacactatatattgtattttgtaacttgcttttttatactctaccatatatcttggatatctttctgtagtagtacacataaggttacctattttttaacaaccgtggattttaatttgtaagaatgtagccatttacttaatgtcatattgagttttcaaacagtttccatttttttgcacagctatacacagtactgtaaggaatacctggaacatacatctttatacatttgcccaattatttctttaggatgattcctagaggtggaagtcctgggtcaaagggcatgtatagatatattgctaaattgcccttcatagaggtaacactaattctcatttctaccaataatatttagacgtgcccattctgtcctttcaagcataatggtacatattgccaagtaaattgctcttcaggaagatggtacctttcttcatcctgggtataacaatttgaaaaaatctttggcagtttgatgaaagctattaatattctactctaatattattagtgataaggcagttgcatttttcagtttttttgacatttgtgtttcatgtgcccaaatttctttttttctcatgaaatatatccttaaaattttaatttgggtggccaggcatggtggctcatgcctgtaaccccactttgggaggccgaggcaagtggatcacctgaggtcaggagttcaagaccagcctggccaacatagtgaaaccctgcctccactaaaaatacaaaaattagtcaggcgtggtggtgcacacctgtaatcccagcttcttgggagaatcgcttgaacctgggaggtggaggttgcaatgagcagagattgtgccactgcactgtagcctgggtgacagagccagacttcatctcaaaaaaaaaaaaaaattaattaatttggggatcaaattattttcaaagttagccagaaaatagcaatattgtagaggttaggtaatcctggattgatagttgggttctgtgtatctaaacaatttaattccttgatgagttctaattttaattttaacctaatgtcttaagctgctatcacatattttataaactcattttatttatatagtctatagctatccagacctatatgaaaataataagaaaaatgtagtgatctgattaaattccagtctgagaaatagcttacttttgggcattcctgcattttcagttatcttttcaggcaaaattagtttttctttaggtttataaataattcttacatagcacctggttgtgttatatgcattgttgcagagaaatttaatctaattttttttagcttcctgtgcaatgcctaatcacaaaaggtggttgacttaaatttcctacatttgttaaaataattaagtctagaatctttaagattcttgttaagaatcaattttaatgacctcacaagtcatataagtcaatcagatttaacatatccttaacatagccttaataaatgcgcctatttatgcatcctgatattaagtgatagaatttagagctatgaaagttttatagtccaatcacttcattttacacataagctaactgaggccttggaagtgagtgactttcctgaagacagtagagtggagtcacagggagaagtcagatctacagattctctgtccgtaagttcttttcactaaaccacacgtgaacactaataatccacatttataaaattttttttttcttcagaatctttagtatatttcacatttttagctttgcttgtttttgttgggagcagtctggcaagggggagctgatggtataatgagcaggggttatttttctgtgtccaagaaatggtgacatgtgaatcatggtggtggggtttcttaccagttctctgccaaaggatattttgcaaatgctctcattttgattcccagtgcctacatagtacagctgcaagttttaaccactgtaatggttgtttgccttttatggactgtcttgtttgaaagcccttgctgggtaactaaaccttttcttatatatctttacatctctgactcttatagcattgtccttataaataataggtgctcaaaaaatgtctgacaatgaaagtatttttcatcagtagggataagctctcatttgctcctaagttttatgaaagatttcgggtaattaaattacaatgcaattttcttcttgtgcttcttctttgtttgcactgatattcccattatgtatttgcttaattatttggaagttgcaagaacagcatgaaaagcaacttataatggctggcgaagtgtcatttctcctacctaagccttctgaacagatttaaaggttgcacaattctctgctaactttctttttaaaaaatatgagaagatgaattgtccgaagaatcccatccaatagaattgaagtgatttctgcatcctgtgctggttttaggagctggtttttaagtctatgaggcttctgaaggattgtcagagacaatcctttttttgttgttgttttttgttttttttttttgagacagagtctcgctctgtcacccaggctggagtgcagtggtgcgatctcagcttactgcaacctccgcctcctgggttcacgccattctcctgcctcagcctccggagtagctgggattacaggtgcctgccgccaccatgcccggctaattttttttgtatttttagtagagatgggatttcaccgtgttagccaggatggtctcgatctcctgacctcgtgatccacccgcctcggcctcccaaagtgctgggattacaggtgtgagccaccacgcccggcccagagacagtgtttttaacagctggctgccctctaacaaaacagggaacttcgcaaggatcacctcccagtgaaatgattcttcacttcctccttgaccacctccactgcctctgcccagccccttcctccctggcttgtaccccactctgtctcctttgatggtcttcctgagttggcccatgcggttcagtatgtagtccataatctccctctttctgagttgaggaggatattcaggttataatccccatacaatgaagtctatcagaaatcatcgtaattttttttttttttttttttttttttgagatggggtcttgctctgtcacccagactggagtgcagtggtgcaacctcagctcactgaaacctctgattcccagtttcaagcaattctcctgcctcagcctcccgagtagctgggattacaggtgcctgccaccataccaggctaatttttgtatttttagtagagacagggattcatcatgttggccaggctggtctcaaactcctgacctcaggtgatccacccacctcggcctcccgaagcactgggattacaggtatgagccaccacgcctggccaaatcatcgtaatttagtcaactccagtctgagttgaagcattaaataagcatttgcagcatccctgtcatctgttttactttctggtctgtacatcccttcttaagtcagattcttgagattagtcttctttggacagaccattagccccaggtggagctgctgatcacaacccctccctgtaccactcccaaggctgttgtcatcatcacttaccctaagccagttacttttcatatagtatgctttaggatgtcccataaacactatggacaaagttggtgttattatccttaatttacgagtgaggaaatcaattgttgttaaccaatttgcccatggctggatagcgagtcagtggcagaggcaggatggatgtctgactggtgggcctgtgcagcaaactgcagctcctgggccaaatctagcttcagctgttgtttttgtttgtttgtttgtttgtttgtttgagatggagttgcgctcttgttgcccaactgggagtgcaatggcgcgatcttggctcactgcaatcgccacctcctgggttcaagcgatcctcctgcctcagcctcccgagtagctgggattacaggtgtgcaccaccacgcccagctaattttttgtatttttagtagagacggggtttcaccatgttggccaggatgatctcgatctcttgaccttgtgatccatcctcctcggcctcccaaagtgctgggattacaggcgtgagccatcgtgcccggccaagcctcagctgtttttaagtatagcccgtgagcgaagatggttttcccatttttaaatgattgaaaaaaaatcaaaatcaatgtttcatgacacatgaaaatgatacgaaattcaaattcagcatcgacaaacaaagttttattggaacacagctatggtcattcatttatatgttttccatggctgctctttgctcgacagctgtcgagttgagtagttgcgccagagcccctatgtcccacaaagccaaaaatatttgctatctggtcccttgcagaaaatgtttgttgaccctttcctttatgactttattccatcgaatactggggtctcttcatgacagagctcccagaaacattcctctctggctttaattggaagttgttaacctggataactactgctctgctgctcagccagagacctcttgggcccagcccacaggaaacgtctgagtggtgtctctcctagttataagaattgtaggtcattgctcatttcctctgaactaagttacccgtctccttttgcccgtcctggggtcttttccccttagttgtgttcttcctgtttgctttatatttctttcctttttttcttcccttcgatgagaagctgcttattaattcttccctgagactcttcatcctccccttattgatcccacatttctttagaaagtattaggttggtgcaaaagtaatattgttttttatcatcacttttcatggcaaaaaccacaattacttttgcaccgacgtaagaaatcaaaaataactctcctgctaccaccattgcctggcttgttggttatcatcatgacccagctcagaggttccatcatttcttttgtgtcaacgtgaaagcctccctgcatgggaccagagaggtttccagttatcatctcctgcaaagtttagagctgttttcttacattaaccccctaaccccgggtgggcaattttcttttgaggacgaatattctttgtgctcacagagtcgcttacatcgtggatattgggtatatttaggagagaaggttttgatagagggtctgaaaatgaagggaggtgaaagctacatgtagacagaggagctttggtagaatgagcccagatttgttcaccacatccagaatgatgtaaatttaagtcacgtacaaagaagtgctaatttctaccatcccagatggtatcactgctgtgattctttctgtgctccagatactgtgcttagtgatgaatgtgaattctatcatttactctcactatggatcagtgaggtgatatcccattttgtagatcagcaaactgaggccggagaggttaagaacttgcctcagttaccaaaccgatagtggcagagcagaggttttagccaaggtctgtctgacctcagaatctgagctcctggcgactccacttgagacgtcactccaaaataaaggtatgaaatccattacaccaaagacatggtcgaagaatgaaaaacgagtgtattctgtaggaatttggatagatttgggcataccagggccaagtatggtaattaagaagggctgacctgtgtctagctatttataggttctttttgacatgtccctttatatgtcttttgatcacagagtacagagtctgactcattttgactcttaaggttgagttccaaatagaaactgcccattggttgaaggaggctgattacaattggcccactgatagttactggtctggatatacaggaatgttatgttaaaatgtaggtaacaaatattgcttccatttgctgttctgtaggttgtatcacacagaaactaagccgactcaaaccttgtgtgtttccttacacatctaagttaaattgtattaaaactaacaagaacgtggccagtgtggcagcatacctaagtgtggggattttgcagcccctttttggcttagtgactttttttcttcctggttgtttctatgtaaatgtaacaatttccttgaaatgatgaatgaacccacatctccagtgttttcctcttgtactggacagagtggaggaaactggaattgcctgtttttgtggcagaggaggtagatggggatggaaatgaatttccttttaaagcaatgaattctttttttttttgtttttttctgagatggcgtatagctctgtcacccaggctggagtacagtggtgctatctcagctcactgcaacctccgcctcccgggttcaagtgattctcctgcctcagcctcccaagtagctgggattacaggcgcccaccaccacacccagctactttttgtatttttagtagagatggggcttcactgtgttggccaggctggtgttgaactcctgacctcatgattcgcccgcctcggcctcccaaagttctgggcttacaagcatgagccaccgcacccggcctaaaccaatgaattctttctcggctttctctccagccaaagcagaacagctatacctatgcctcagttgtttttcatgatcccatgtcgaagctgcggaaatagatggtctggttgttgagtgacaagttatttattcccttcctttattctccctcctccaatttcaaatgggatgagaggagatagctgtaagcgtagggctagaatctgaagaatcagtgggaacagaatagttcagagtatggaaattagtttgaagtaaatgtagagataacctttttgtgatatttgtaaaccttgcgaggcagtcttcacagtttatttaccccttcctgtacccgaaacacctttgccatttgaaaaaaaaaaatcacaaactctgcatatacctaaaaagaggacttggataaggagtttgtttagatcaattcaacaaaggtttttgtttgtttgtttgcttttttcattcagggtcttctatgtggcccagtctggcctcaactcttgggctcaaacatcctcctgtgtagctgggattacagccagtgccactgttcccggctcaaataatacatttttgatctattgttatgtttaagacatcatgctgggtagaaataggcagaaatgcatttgactttactcttccagtgattagccatgtggccttggaaaatctacttaacctctagcttcggtttcttcaccttctaaataaaaagactgacactcattcacgaggtctttatgaagattaagcaaggtcatatatgtaacatgctttggccagtgcttggcattcatttattcaacaaatatttatgagtgcactttatatttgaggtactttgctatagtactctctctataaacatacatttgcttcactcttcctttccttccagcccttaaggaggttattgtctaggaggaggtaagaaaagcataaaaatgtgtagaatctaaactggaatcctagattagcttaaaagaggtactattgagtgggaaagtcctatgaataagagagagatcaggaaagtgttgacaggtgtggaggtatcaatgtgatttttagaatcaatgaggaaattagatccaacataggtacgggaaggactcttgacttctagtatccagtggcacaatagaacaataaaatagagcaattctttagaaggatttaaaaaaaaaaaaagaaaagaaaatgccccagcaaagtatctgaagcttaagagaccttacttgtgttttctaagaacttcctttttcttaccaagattaatactgtagctattgcttgtgattgcaataggtgaataaatggaatatatcatatctcatacttttaggtgttttttggattgtggaaactccaggaaatctagaggttaatagttaaacaagtatatcatatcaaccaggtttatagacacactgtaattatataagcaagctgttggttcaataatcaacgtctagctgggtcagggaatattttccagagcttggccacggctgtaattttcattttttataacctgctaacatgccaacctgccttttccatttctttttgtttttctcgaatcatctgaaatcagtgtaagagaaggaaacctgttcaatgtacttttgaattctcattttatttacctcaagtaaaatagtgttctggaaagttcttcgtattaccaaattgactttctcaagcatgatactggatattagcaagggagttcataatttattttctatttttaatttcagaaaaatacagttctaagagataaaaagataaacatataaaaataaaaaggaagataaaaatacaggataaaagataaaatatttaatacaattaatagattaaatacattttttcttttattattttggtttcaaaaacagagtgacgtatagctctggggctcacagtgggctgtttctctgtgaacctagcatttaatcaccttctttccctcaataactccatttaaacagagtcagtacagtgtgaaggaggtgaattgagtcacccctcctcagattcatgtaagccacagggcagttttggcctcactttgctgtgtggttaaagataacatatgacccagccaggtagaagacctgtcagccatatcatctcattcaagtggcctgcaaagtcttcttgcttgggactttgttcctgaatgagcctctatttttgtaaggaaagtagaggaaaacaatgcagatttaattctgaaattggtttaagaatgggattgagaaattttgatatattcagtctggaataattgttttccatcccgagtttcattctttctttttgatgtaaccctatctaaggacaggatagctagtcagtgttgagcaagacatggcaggtagaggactagctgtctctggattgcatttaacaagcattatagaacaaccaaataaattatctgtacctcactctgtgctagactgatacaaaaatgaacagaatcctcttactaccctcaagaagctcatattctagtgggatgtctatgtttgctagagctactgtaacaaagtaccacaaattgggtggcttaaaccacggaaattaattgtctcgcagttctggaggccagaggtccaagatcaagttggcggcagggctggctccttctgaaggccataaggaaaaatctgttttgtgcttcttccctggcttctggtgtttgctggcaatctctgcatttcttcccctgtatactcatagcccagactttgccttcatgttcacatggcattctgcctgtctgtgtctgtatccaaatttcccctttttataaggaagccagtcatattaaagttagggcccgccctactccagtatgacatcatctgtcatcaagtaagatcccattcagagatgctgagggttagctgagggttaggacttcagtatattaattttaggaggacatagttcaacccataacatggcaggcaaacatggtcagcaaactaatgatactctgtgtgaaatgcatgtaagttctggtataagatacgagtaggataccaaagaaggtgggtgcataactcagcctgggaagatcaggagtctgttggtagaggaaggaccttaagttggtatagcagaacttgcagtgtggttctcaggagaataaggaagtaaaacaagagacttcccatctggtccttgaacggacagactacctgccctttcttctgtttttgtttttgttttttttttttttaattgttaatgacagactggatggttctaaactggggtgtgttaaattagagaacacacacacacacacacacacacacacgttgttgtattgattcccaaaactgaatttgtgtttagtggtaatgagacctacacaacactccctgtggttgtcacaggcagctttgatgtacagatacagggacaggacttggtggttgggagaaaggatcatccttcccattgtaacaaatggtcctagtcctactgggacaaagtttcagagggagagagtgggctgggctggtggctcatgcctgtaaaccccagtcaggctggaggctgagacagaaggatcacttgaggctaggagttttgagaccagcctgggcaacatagtgagactctgtctctacaaaaagtgaaaaaaaaaaaaaaaaattagccgggcatggtggtgcatgcctatagccctagatgcttgggaggctaaggtgggaggatcacttgggcccaggagttcaagtttgcagtgatcattccactgcactccagcctgggcaacagggtaagaccttgcctctaaaaggagagtgagagagagagagtaagaaccaagccatggcaaagctgatttttagataaggcctgtaagtcttaaaaaaaaaagtattcatgtgttaccaagctcttgcaatattgattattaacaaaggtcttttcaactatgtgtatatttcctagagctaatatgcagctttattttctttatgtgatctgggtacctttagtataaaattatgagtaaaatatcagaagctgtttcagtaagaaagggcactaaggaaagaaattgttaggcatgttgtgtgaggtggttgggggtcaggtcagtggaaaggaacttttccagctgagagctgatgtccatcatccatcagattatcctgctggggtgttgatggcagcaggcttcaagtgtgggggccaggtgggcaacccagagaaagtcacaggaaggtgaagctggggtgtggggcctgggcatcccttggagctaggtagagggatagtcgtgggacaggtgatccgaataacaaaagaacaggtgagcagcagaggctcagcagaaagtcaagaattagatgagtcaatgtggaaggggaagaaagaaataataaaataggccgggcacagtggctcatgcctgtaatcccagcactttgggaggctgaggtgggtgagtcacttgaggtcaggagttcgagaccagcctgtccaccatggtggaaccccgtctctactacaaacatattaaaaaagtaaattagccaggcgtggtggcacatgcctgtaatctcagctactcgggaggctgaggcatgagaatcgcttgaacctgggaggtggaggttgcagtgagccaagatcgtgccactgcactccagcctgggtgaaagagcaagactctgtcaaaaagagaaaaaaaaagaaagaataaaatagagaagccaattggaaaccaggaatcagagattgaagagattcaagaaactatgctgcagaatccaggcaatcatgtgagcttttattccatattagttctgcctgaaagaaatgattatacatctctgattctttcagcttcagcagcaatctttgttcatctagctattatgtgaagatgcactcataagaagcctgagtaggtagggtgtagaaggacacacagaaaaagagcaacagaaactagtttggggcttgtttcaaacaagcccggacttatcttccatgctgagtacctgtacacagctctctaagtgggaccaatggagtcagaggaaaacaggaagcagtgaatcagctggactgtcaagccacttcgtttaagacagaaaccagctactggttttctctgtcaggttagagggagcacgcagtctaatgtgaacaagcaaccctgagctctggacttctacattcaaggcaaagctggatagaagaaacgcaagtgctagaggaagggttatactgctactctattctaacaatgtatcagggggatgtagagcgactcactcagtctttgggaaagcatttggcccgtatcaagaacctggacaattttcgtaccctttgatccagcatttttatttatgagaatctagtctataaaagtgattattgagtgcttactgtgtgcgagtctttgtgataagcactttgctaattaggtctaatccttctcaaaacctgggcagtaggcaatatttatcttctttttacaaaggaggaagttgcaactttggtgcataacttgtctcagattataccgttaatgggtgcagagctgggatttgaatctagtttatttaaacactaaagttcatgcttcttttctataccactgctgtgtccaaacagtgaaaaatagaaacacccttattgtataatatacaattatactatattgtatattatgcatataattatgtcttataattatatataataattataatagtaaggggatagcttaagttatcaaatactcacttgatgtaataggttgtgaggagatggcagtaccattaatggaaagatgcctgtgacccaggaggagtggatataaatatatctggactatgattacaaataagtgcatgtgtttgtgtatttatgtgtattttgttttaccttaagtaagagtctgcgttaaggagaatttcatggagtccagttgcaggaggtatagctaggcctggtaggagctaagtaaggcattctctgactccctccctctttctttatctggtctatcccctccctttgcagggtccctcattcggcttttctctgagggtcttctctgctttctgcttttcttgtggaccaggctttttgctcactcatcaatcaacatgcacatagtttaaaagactcaccttctgtgactttcttgcatctatatgatgtgtagttgttccagtacccaccatattttggctaaactttctggtctgagatgacattctctgtctttcagaaaaaaagagaaaaatgggataatgtgatgaggagtggctgccggattggctggatctgagtcaggtgttcacccctgtgcatatgaggcattaaccccatggctcactacccacttggaggtgctgtagatccagcttatctgggtaggggtcacagaaggaacagtcaaatggctgatgtcatacgcagactgaaaggaaatgcattaagcaaatgaaaggaacgaatatggctggttagactgatatttaaatgaagctttgtagtgttgtgacatgtggcattttacatcattcttttaatacaaactctgcataaggttacatactattgatcatgaagaacttgatttttactccagatatatcatttaacccagcattcccattactgggtatatacccaaaggaatataaatcactctattatgaagatacatgcacaagtgtgtttattgcagcactattcacaatagcaaagacttggaaccaacccaaatgcccatcaatgatagactggataaagaaaatgtggcacatatacaccatggaataactatgcagccataaaaaggaatgagatcatgtcctttgcagggacatgaatgaagccggaaaccatcatcctcagcaaactaacacagaaacagaaaaccaaacaccacatgttctcacttataagtgggagctgaacaatgagaacgcatggacacagggagaggaaaaacacacatcggggcctatcgggaggggtgggggagggagagcatcaggacaaatagctaatgcatgtggggcttaatacctaggtgatgggttgatgggtgcagcaaaccaccattgcacacgtttacctatgtaacaaacctgcacgttctgcacatgtatcctggaacctaaaattaaaaaaaaaaaaaaaaggatcttggttattacagatgcatctccttggatttgcttatattctttgtgaggggaagagactcagaccatatacactatgatttgttctgttgctgattacttttataacaagaccactggaacagtaaaaagggctacaataccctctggtgaacaaactgaggcaatgctcttgaaccaagagaaccagaaaaggcacattgatgctctctaatggttaagtgacaagtacaagcttaattgtccaatgatgtgacagttgcccaatgatatgtggtacaaagagtcagggcaagagatatcaggcaaaatctaaagacaagacttcagaatcatggaatattacacatagcagggactttggaaatcagctagcccaaccacctcattttatagatgcagcaattatgaccgagagagattatgtaactggaaaggccaaggtagcggtaagccaagtgtggaacacagatcttgtaaaactcatgcctgggctcttgttaggatctcagtgcatcttgaagctaagtcagactttgactctctggggagcccttatagtcttcctataaagacagaaactaactgctgaggcttaaagatataaaacaaacaagaacaccaggcatggtggaaatcaggacctctgtttattcagtcggtcatctgctgattgagtgggtctgttcaatcgtgcatgtagccattcctctatttattaattccttggacatgtattagctgcttcactgtgtggttcactgctaggcatggagagtgtaaagagagatgattcctactttctagaaactcacattctaatgggggacagatgtctctgccaatgtttgtgatgtaatgatacctcaaagggaaagtgattattaactgcttggatcttgaaaggtgaatgggagaatcaaggattgggagtggacagtcaaagcagatacagctttggtctgtggggcaagtgaaatgacacgagtatctagaaaattctaaagttctgtatggttgggatgtaggggtcacctagcagacccgtgagagatgagataggagaaatagacaggagccagggtacagaaggccttgcagttgaggaggcattgattgcttgacttcaatatactatgaagtgctgccgagagagggtttcttccagcagctagattagcatcattttgtattttagactcaactatgcatctatgtcccttagcaacaggtttttgttaatattctgagctcagaatggaatggatagccaaattggctttgaagagctttcctctggcaaatctacccctaaaagataccaacctttacagagaagagagtttgcatgggttgattagtactgaatgtagttttctttaactaccatttgatgactcaactcataatgacattttgttggcatttctccaacttgcacttgcctctgttcaacagggcatgccttgaggtctgattatacggttttcattcatacgacatgtctccccctctgctttttgtaacttaacattcctgcctgccaagaacgagggagcttgctggctctccccattggcctcttccatgaggtcatgtgagtgctgctcactcacatttgagtgcctgccactctggaggttttacagaacagaaaactcagcctctgtgttctagagctggagcttctgggcctttggaagtcagtcttaatctctgaaacaggagagtgctccagggttccagagtcttacaaaagtgcaggaaaatgcaccaaggttatgataaaatgcaaagccacacctaacatgggctcttccaaatttcataagcagttcacattattttttatttttccactttcttttttttaatcttgaaatttccaaagtctgtatccacagccttgcatagttcttagcaacaaacttagcaacaaatcagagaaaaaaattagttatctatatttttaacaagatctgtgatctcctccacatcctctaaccgccttgggcctcagtttttttgtctgtaactggacggtcactacatactattatttaaagaattacctaatttgattaagaaaatccattaagcccaaaaaatgtgaatacagagatagggtacaaaagcaaaagtgtaaaattaagacaggtgaatgctagcagatgaaataactcaaacattttacctttcctgcactccagttgggctcaaggatatcatccatgcttttgtttttggttgaagcttgaaaaaataaatgacttaaaccatattctaatagtaacctgaatttatatataaaactgacccatgtttgttttccaaaatgcatttttccattttcactctgctaggaataaaagataaacaatggagatagaggaagaatggcctttgaataagaattgtaaatgcggccaggcgccgtggctcagcctgtaatcccagcactttgggagtctgaggcaggcggatcatgaggtcaggatttcgagaccaacctggccaatatggtgaaaccccgtctctactaaaaatacaaaaattagccaggtgtggtggcacatgcctgtagtcccagctactcgagaggctgaggcgggagaattgcttgaacccggaggtggaggtggttttgagccgagatcgtgccattgcactcctgcctgggtgacagagtgagatcctgtctcaaaaaaaaaaaaaaaaagaaaagaaagagttgtaaatggtagaatgtaaaattaagaaaggttgtgaagttttcaaggaaagacagcattggctttgtgagttggtttagatctgatgttagtaaaagttaaaaaaaaaattttcttttcttttttagacagagtcttgctactgtcgcccaggctggagtgcagtggcgtgatctcggctcactgcaacctccaccaggttcaagtgattctcccgcctaagcctcctgagtagctgggattataggcacccgccaccatgcctggctaatttttatatttttagtagagatggggtttcgccatgttggctaggctggtctcgaacttttgacttcgggtgatctgccctctgtggcctcccaaagtgctgggattacaggcgtgagccactgtgcccagccgaaaaaacaataatttcaaatatgttccaatcatttggaatcgatttaaaataaaaaaaaaaaaaacaaatgtgctgccagcattagattgttagactgcaaacaacactttaaaagaagtgaacagctgtcacacttctctgtcctctgtagagatttagctttggaaagataacaagtttgtaaattaacagatctcatctaaattccatccttttcctggagcttctgctatcctaatccctcaccctccaagagcacagccctttgatttacttgatccaaagaacttttacttcctttcgctcactgctggatatgctaataggtagggttaaatgaaaattgataaaaaaaatactataattatttttgttttataatagtgattgtacagtaaatattttttatatagttttacaaaaatacctatatgggagtttgtgctttggttatttaaaccttggaaagaattttaagaattttaagaattttctatcttgtttacaatgttttatcctcagattcaggctcggtgcctggcacgtagtaggtggtcaacaagtacctttagaataaataaattatttttatcagtatccagggcgagccttatgcaaacttataaagtggactaagttggtttttgctaaattcatcttcccttttctagtctttcctcttccttcttctcataggagaatatcttgtcacacctgcagaatcctcatgtgtcctctatatagttgaccctgaacaatgtaaggattagggacactgacccccccatgcagctgaaactttgcatataatttttttttctctctctttcttctttttttcttttcttttcttttatttatttttttttttagacactgtctcactctgtcacccaggctgctggagtacaatggtatgatctcggttcactacaacctccatctcccaggttcaagtgattctcctgcctcagcctcccaagtagctgggactacaggttgctgccaccaggcccggctaatttatttttatttttagtagagacggggtttcaccatgtaggccaggctggtctcaaacttctgacctcaggcgatcctcccaccttggcctcccaaagtgctgggattacaggcgtgagccaccgtgcctgcctgtatataacttttggctcccctaaaacttaagtgtcaatagcctactgttgaccagaagccttaccaataacatacacaattgattaacatatattttgtatgttatgtgtattatatactatgttattacaataacctaagctagagcaaagaaaatgatattaagaaaatcatcaggaagagaaaatatatttactaagcggaaatggatcatcataaaggttttcatcctcatcgtcttcacattgagtaggctaaggaggaggaggaagaagaggggttggttttgctgtcttggggtggcaggggtggagaggaaggcaggagaggcagacacatttggtgaaacttttattgaaaaaaaatccacatataagtggacttgtgtggttcaaacccctgatgttcaagggccaactgtatatgtatatatttttattgtggttaaacacacataatgcaaaattcaccattttaatgattttagagtatacaattcagtggccttttgtttattcacaaggttgtgcaatcatcaccactatctaattccaaaacactatcatcatcacagaaggaagccctgtacttattaaggtgttgctcttcaacccttcttcctgcagtccctggaagccgctaatctactttctgcctctttggattcacctattctagatattcctataaatggaattatacaatgtatggccttttgtgtgtgacttctgccacttggcaaaaagtcttcaaggttcatccatgttgtagcatgtatcagtggttcatcccttttatagctgaataataattctgttgcattgctttaccacattcttctctttatatttcctatgaaaacctagtatctggagagccgctgaaaaagtagccaataaattacacgtaagtgtagctaatagaaagtgagttgagaactcatccaggggaatgtgtgttgctcctgtggtggaatctcagggatgaggaaacctttccgagggggacaggagactttctggtgccacatgaatggctgacttgttgtaaagctaagtctaccaatagctatgggactggaaaaagcattgcattgagtagatggacacacaggttttgattctggtttagatgtaactaattgggttgcctgcatttccatgggtccaatgtttctgcttgttgttttggttaccttgggtttggctttctatcaggccttctgctaagctcatttacatgcattatctcatttaattcttcacaaaaaattatatggaagtcatagaagactaaatacaatagctgaagttttactttcagtgaattgtgagggagagattcaaactcatatctgactctctttagcctgagctcataatcactatatggtaggagctggcaaactatgaatctctgcatttttttgtacatcctctgagctaaaattgttgatacttttattttttttctttttaagatgtggttttgctctgtcacccaggctgtaatgcagtggcaccatcttggctcacttggcctcccaggctcaagccatcctaccacctcagcctcccaagtagctgggactacaggtgcaccaccacactggactaatttttattttattttatttttgtagaaatggggtcttactatgctgcccaggctgatattgaactcctcggctcaagaggtctttccaccttagcctcccaaagtgctgggattgcaggcatgagccaccgcgcccagctggtacattttaaaatgctttacacgagtcaaaagaatattttatgaacctgaaaattacatggagtttaagtttcagtgtctataaataaagttttattggaacacagccctacttgcatagctctgtgtttgtactgcaatgatagagttgagttattggcacagaaactctttggttcaaaagctctaaatatttactatctggccctttaaagaacatatttgctggttatcattcataaaatggaggcagagaaagaattaagtcattcctcaggtccctttcaacttaaatgttctgagaattgcagagaaaattgcttacatcttctgttttcctatgaggtctccatctctccctgccctctctcattctcaacagttgagtttgcctcttttcttaaaaagattgagtctatctaaaatagatgcctcatctccagtcatacatccatatgctgacttcccatctctctctctgtatgtgtcctttcatcaattctcgatttcctctattctgagaaataacaatattaccatttattagatgcctgagatttctagcattctacagagttgtgaagaaggttcagagatgataaatgtaaggtcaggcttattatttccatttctggggtgagggagttgaaggttgaggaggtcaaattgcttttctaggttgtgtcaattagtaagttgtggtgccagagtttgaacacgtctttctgatcaaagggactttacttctcttgtctgatgttatctttgctctctgtgcaccaaaagccatctcctccacaccacactccaccctgttcttctgtgtatgccctcttgatttcttcccttctttttctaatcatttcttttggtattaagtttgcctcctgagaacaacattcccttaggccagctcgtcttctagctaaaatagctactttagctgctaagaataggaatagcatttcttgagccattacattcacacaccagacactgtgctaaatactgtataagtgttgtctcatttaaatttcataatagttttacgaagttgctactattattaccattaaaaagggggaaaccaagccttggaaagggtaagaaattatccaagggcatatagttggaaagaatctgaatagagacttgaaccctctgtactttctttttttttgagatgaagtcttgctctgtcacccatgctggagtgcagtggcatgatctcggctcactgcaacttccacctcctgggttcaagtgattctactgcctcagcctccagagtagctgagattacaggcacctaccaccacacctggctaatttttgtgtttttagtagagacagggtttcactgtgttagccaggctggtctggaactcctgaccttaggtgatctgcctgccttggcctcacaaaatgctgggattaaaagcataagccaccacgcctggcctagacttgaaccctctgtactttccaatcagtatgccttacttccctatccctaccccagcctcacccaatataactcatctcctcttgtgacttacagtggtcccctctggcttcttccttttcaataccacccattctgttctgcatctcatagtgtgatacttactttctctttaatactaacattgctttcacagctcacctgtgacttcttttatcatttcttttcactttagagaacttcttttagccattttttttaaaaaaacagtagatctgctggtgaaaaattctcagagttgttcttcatctgaaaatttcttgatttttccttcatttctgaagggtattttctctggatatagaattctgggttgacaggttttgttttgttttttttttttcacatgaaaaatgtgctgaatccttctagcctccattgtttctgattagaaatctattgttactcaacttattttctcttgatacataatgcactgtttctttctggctactttcaagattgttttctttagttttctggttactatgatatgttttcattaaatttctttgagtttaaactatttggagtttgcacagcatgaatccataggggcacatgcgtgagtgtgtatatatgtgtgtgtgtgtgtatgtgtgtgtgcagataatatatacctttctcaaatgtcagccattacattcgtgtgttatgtgactataggtatagtaaacatatggcattatacttttatggggccacccttgtgtatgtaggacagaaatgtcatgatgtggggtgtgactgtatttttgtttgtttgttttttagtccctcaattaaccaatgaagattgtatgtctttgaatacttttcagcctcaaattctttctcttcttcttttgagatttcaaatgttatatctgttgttatagtttcatatgtccctgaagattttttttcaggtctattttctctctatttttcaaattgggtaatttctattgctatgtcttcaaatttattgattctctgctttgtatcttccattctgctcttgagaccatccattgagtttttgaattttggttgttgtatttttctagttctaaattttccatttggttcttctttgtatatgcgatttctttgctgagatgtcctcttgtcatttgtttcaggcatattcaaatgctcgttgatggctgccttaaaattcttgtcaggaaattctcacttctgtgtcgtttcaatattgattgtttttcttattcagtttgagatgttcctatttcttggtatgacaagtgacttttgattgaaatctggacattttgtgatatccgattcttacttaattcttatgattcttacctaaaccttatgatttagaagatctcctctgacactaacctggtggctgaaagggggtgctgcctccttactgccaggtgggtgtagacatctagattctccacggggcctctgttggcacctggagagaagggactccctgttactgataggtgggggtgcttcaggcttcctcctaggcctccactgacagttctctggctgggagggagaaaggcacttggtttctactccccatctggcctccactgatgctgtagagagggtggttttgctaccactgaacagtggtagaggtcttgattttttactaggtcttatctgacactctccctgtggggagaggaagtaactttcttctggacattttctttgatttgtgctatctgtacttattgaaaatccatttagttacctttttataaacacagtgctattcttactttcctgttagtttgattattccttctgttacctcgactccttcttcatcttttaccttccaaatgtggacgcttcccagagtggcttttctcttgaggtatgctgttgctctaagagcacttcactgtttccagacctctggattttacctctcatgatggcaacttccagatcttgctccctagatcttgcctctccttggatccttaatcctgatggtctccctccttgaaagacacttctgacttcatctgccaccacttcatacttgataactatcacaaaaaaatgcagttgttttgctttctttatcccaattttgtttccttctcaatttcccaacctctgtccataatagcattgttttcataagcctgtggacattaaatcatctggtttctttcttttcattcacaatatatatcacacagtgaaccacagggatggaagggggaaatccaaaagtaactaaattgcagttcaatggtacagaaagacaaacctagttccctttgtccctttgtctttcaacatgcattacctaaggtgtgtatttagggcaaaaagcacaagttaaatctggttctgccaattgtaagctgtgtaaccttgaatacttgacttaacttcagtaatctcagtttccccatctgtaaagtggggatgatgataatagcaactgcagaggtttgattcaaggatgcaataagtttatttatatgtaatacctaaacatatctggcatctaatagagattcaataattatagctcttggtcttctattaatataaaacagtattttccatcctattgctcagtcccaaaccccagaattttcctgcttgattttccaaggtgttttattgtctcttcccacccagaccatccagtttatattcagcttgtttttcacacccaaacatgcattctttcctctagtcagcctcttatctttatttaccttgaatttattgtacctctctcataccttatgtttattcttagaatgtccatttcccctccttccccttcaaatcccatccatgcatttgtcaggcctcagcacaagtgctggagtcttctgtggctgttcccttctgtcctgatctcttcctctgtgaacttcctttgaacttggagtaaccaagcaatagaccatggcagtgtaaggcgccatggaggctgtgtagttcttcccatttggccaggttacaagcttcaggaaggttatccgacctgtttgtggtagtgttagaccctgccctctctacgtcatataaaatattctctgaatcctatacactttgttatattattgaccattcagttgataaaaatctgagcggttattctacagtagttctctgaggtagttactgaagaaagaaagatgggtaaggaccagttttatgtacttgcatgaagtttgtgccctaggtgccacacttgtcttaccctaatccttgccctagtaagactttcacttgtcttgggagctcatcactggggtttagggtaaaggggttgactgacactctcaaaaccgagggaagcacagtggccacagtagagattccgataatgcagagaaagtagtgataagttggtagggggagaggtggaattaagaaagattcacaaaggaaggggttgttgagctgtattttgaaggataagagttctccagaaagaggaatgcattttagtcacagtgataggcctgggaaaagcaaaggaggcataaacatgtcctgtgtggggtatcagtttgttgctacaactgggatgtgtctgggtgtattgtccttaggatattgaaggacaagagatgatgaagggaatgaccaaaactagatttttaaagattatttcactaaaaagtccatgctcttcttctaacatcccattctgcttccatataaaaggtctgagtagggttggtcctaaaatattttagatgatctaatctcctaggtttgtctttctgtaccattgaactacaatttggttacttttgggattcccccctttcatccctgtggttcactgtgtgatatatattgtgaatggaaaggttgaatggagtcaggaggtttagtggcacctcactgggaggttttaggatagagcagggtactctgctggtcctggttgatttcttggccttgaggatgatttctgggtcaatgagttttttgttaaaagaaacgaattcttaccaattttggcaagaaaaagaatccatcaaaagaatttggtgtagctcactccacagggccagagaactagaatcagaagcaatccagctggagtgaagccccgaaacatatcgaaggaaggggtctggtgcaatataacacagctaccaccagttcaccaaactgctgccaataaagcctccccaaccggatggagctgctgctatcattgtcaagtcccaaaatggatcctttgcagtctctccatgtctgcatcactggggactgattctgaggtttcagtggttgcccagggcccacactttagctgcaatgaatgctgggagatgagtatccagcactttaagcttctataagggatagcagactctgcctcaagaggtggaagagtcaccaaacataaaagggaatgaagatggcaaatgcatgacaaacgtccactgaactctccaagttggctgttgcatacatgccactaactttcatttactggagacttactggaaatccaaagcacattttcttttatttttatttttattttttgagatgaagactcactcttgttgcccaggctggagtgcggtggcacgattttggctcacagcaacctctgccacccgggttcaagagattctcctgcctcagcctcccaagtagctgagattacaagtgtgcaccaccaggcccggctaatttttgtattttcagtagagatggggtttcaccgtggtggccaggctggtctcaaactcctgacctcaggtgatctgcccacctcggcctcccaaagtgctgagattacaggcataagccaccacaccagccccaaagtacattttcatcagaaagaaattttaccaactccgaggtagaggaaggaaacttgactcagggaagttaagcagtggagagaaaactcttgggtcttagattacttcctgacctcaaaagcaaaagggctggctcagccttagctaagtctgtctgtcagtaagctaattctggttcatttaacaaaagtgaaattgtaaatgtggacagccctgccttgatttgtgaacaattttcagaaatcaaagatcaaatcatggataaatgttgtttggttcatattaaaaagttaacaaagaagaatacatatttttcttgttttgtagatgggaaaacttctgcatatttaaaggaagtaacgtgttttgggcttacatgactaccagttggtgaacccaaggctaggaccgaatctctccattttttttttaaatattcttctcactgaaccatgagtatttccctataagaattctctttgggtaacaatgaattgtttctaaagcctgcgtcattaagaatactaaaagagctcctgatttatgtgtaataattgggttgacaggacatacacactacctttatttctcattaatagttatttagatgagagatatggtgcatttctctaatctggcttggaaaagtaaagcttgtgcaggtctctttttcttattttgagatatttatactatcagcttcagtttcaaatgcatcaatcttaggtttagttccaatttacttcaatttattaaaatatgtattgaacactgcataagaaatcaaatgggtacacatacacctaaggagttaagggttttaagcaagaaaagaagtgcttattttttaccctgcaataaaggtattttgggtatgcagcatgttgttttaccagctgctaccttagcgttatatttacttttattgctgtagtctcttctggtgattaatagacaccaggatgggggagggtggatctatcatttggcctaagaatatcaagaatcaagccaataattgacagttttccattaagcaacagaactctagcattctgctagggaatgggaacacaatacaaggatacagcctggatttacattagtcaacaagctttttgagtgacacacagaaagcctaagctatactaaatgttaagagattgaattgctggattaagaatcatgttactcaggctaaatcagaagtaggactggctgagctaagccattttctgtacctcagtttctccaccaatgttgatagatatttactgtattccagagctctcatgtgtatcagctcattgctccttcactactaacctattaggtatgtgttgtttcttcctttcacaggtgaggaaaccaaagttcagggaggttaagtaattttctctgaagtcacagaagtagttaattgcagagtcgggatgccaacttcgatcaggggcactctagagccactcagtctcattgcttctgcttaccctgccttttgggtatcatttgagtaccccccacagacgccaaagtacatgcacgaacgcctcctccacccttttacaattgctgtgctttgagcttattgcagaatgggtactggaaaacacaattgctagacttaagaataaggttttttttttttttaaaggtattgaattatgcaattatctgaagtggtcattcattggaccacttgatgttgtggatgatttatataactttgtattttattataacctctgtttcttttttttttttttttttgagacggagtttcactcttgttgcccaggctggagtacaatggcatgatctcagcacactgcaacctccgcctcccaggttcaagcaattctcctgcctcagcctccctagtagctgggattacaggcatgcgtcaccacgcctggctaattttttgtatttttaatagagacggggtttcactatgttggccaggctggtttcgaactcctgacctcaggtggtccacccgcctcggcctcccaaagtgttggaattacaggtgtgagccaccacacccagcctaacctttgtttcttacatacaaaatagtttcatgtagaagtaggtttgggaattggatttttttaatgtcatttttatatttttgagatggagtcttgctctgtcgcccagattggagtgcagtggcatgatcttggtttactgcaacctctgcctccgaggttcaagtgattctccagcctcagcctcccgagtagctggaattacaggcacccgccaccatgcctcgctaatttttgtatttttagtggagacggggttttaccatgttgaccaggctggtcttgaactcctgacctcaagtgatgtgcccatcttggcctcccaaagtgctgggattacaggcgtgagccaccgtgcccggctaggaattggaatttgatgattgcatggaaggcagttgagtaaaaggcattggaggaggaaggagatgaagaaagaaagaaatagagcaatggcttagtttgggccattggggcattcagaagggtgagcattagtgggccagggaagagacagttaatgaaggtgtactaggagtgagcaggagctgagggacgcttattcctagcggggagcctgtgctggggagacttgctgaaggagagactgggctgagtccaggggagtgcagaactgccagactgttgaggtcagttggcaaacagggctgtttcaacccgaaattgagaggctgcatctggaatacagcagaaagaggactgagccgttcttggggtagagatgaagggaagtcagcccgttagcctgggactgaaacagggaggcatctttaaatgcctcttctatcaataaaccctgacagactcacctaaatattgttacagcgtttccctaatttgtcttgttgtttctaatgtatatccccaggaccccttaccccactagcaatggctcaattatctagccctgtagggaaatattgtaatatggttttgtttttgttttttttttttttcaaattcaagtttagttttctgagtgcagaggcctaatttgactctgtttttcactggactctttctaaaaaatcactgtcttttttttcttgtcacttaaatgtagtctaactttttatttaggaaacacagtcattttgctggtctgcagtgcatggagagtccgttaaggttgctaaggtgcggacctttctgttcccagcccgaagctggaggtctgtggttcccccatggctgtcttgctgcttgctgccgagtctgcccatcactgccttggcctcactcccagttgcagccggccctggccagggctcttttcattctccattgtattttctttctgcttttttttttctcagccacatctccactcttgaccccctgtggctcactcttttagccatccccaggtaatgagaaggctccttctccctggtcagtgaactgattgtttgcggggccggatgtcctcctgctgctttaactcatcctggcgctttgcagcattgctcagagggatttgtcttcattgccggaggtggagttgcctttcctttttcgcctctcttttcttctgtccttgggattcatggcatttccacacactgaagttgttaaaaataaaggcttccttgacaacggaggtgttagtaggtgtagggctggctgggtgtagctgttgcaggtgatcagccatgtgtggcgtgccaaggttaagggcaaaggccggcactcccgggttacagtctttgaaagggatactaccgatctttcgatgacagtggagaaaagctgtaaaggagcgtttttctctttcttttagcattatgaagggcatggattttggagccaggctacctgggttcaaatccctgctcttccacttactagctgtgtagtcttaggcaaattacttaacatctctgttttttaatctgtaaaatggggatgatactggtatccaggacatagagttaatactagtattatatgctatataatatacatcatataaatgttacatataatatatagtacataaactatacatagatagttaatatatgtaaaggctttaaaaaagaagtggtatacagcaagcaggtgctgtggaagagtttactgttatttttctttgttttgcagaagtttttttgtgtggggaggtatatttgagttaaaagcagggatgattattactcctcagagtcctctgaggtgttggttgtcctttctttcttttttctttctttctttgtctttctttctttgtctttctttctttctttctttctttctttctttctttctttctttctttctttctttctttttctttctttctctctctttttttttttttttttttttttgagacggagtctcgctgtcgcccaggctagagtgcagtggcgcgatctcggctcactgcaggctccgccccctggggttcacgccattctcctgcctcagcctcctgagtagctgggactacaggcgcccgccacctcgcccggctaattttttgtatttttagtagagacggggtttcaccatgttagccaggatggtctcgatctcctgacctcgtgatccgcccgcctcggcttcccaaagtgctgggattacaggcgtgagccaccgcgcccggcctctttctctctttctctctttctttctttatctttctttcaagatggagtctcactctgtcacccaggctggagtgcagtggcgcgatcttggctcactgcaacctccgcctcccaggttcaagtgattctcctgcatcagccttccaagtagctgggactacaggtgtgcactaccacacctggctaatttttttttttttttttttaataattttagtacagacggtgtttcaccatgttggccaggctggtcttgaactcctgacctcaggtgatccacctgcctcggcctgccaaagtgctgggattgcaggcctaagccaccacacctggcctttctattcttattttaaagatacagcattttacaagcagtaggcactgcatgaattcatgtagtttgatttaaaaatgaatcacaataaagtactcggcttgactctgagtctgaggcagtagcatccgaaaaggttggtctccaagttgcctggccaggaggtaaccagatggtgcacctgcaccctccccttggaccagcaaaaattgctcctgtttccacaagtgcttttttccttgatacagagacccttgggtttgggatgaagccttagaggtcatgccctgtcccagccttcatccatgctttgcctctctgaaacaatctggaagtaggacgtgggaggtcaaacttatgattcacatttggggcaacggaatgtcttttccttgagacatttttaagacttgtacttcatgataaagttgagctaggaagtggggccaatttttttttttttttagtttattcattaaacacatctcatgagtatactttttgccagttactaaaaatataaataagaccctgccctcagagtagttacagtctagacagtagagttttgtaaacagaaatatgtaataaaatataagaagagcactatgatagaaagtatttatgacacatgcagacacacaaaaaggagggttctgcttcacctttgagtgaaatgggatgggtggaggtgaatcctgaaaatgtttatggaagagattttatgtgagctggatccagagcattgagtaggtttgcatgagtcagacagggaaaggaaacatactctagacagagaaaacagcgtgaataagggcacagaacctcagcgcatcctggaggtctgagatttgcaagaatttgtcatggctgaagcgaaggcaaacaattagagttaacaatagcgaatggtcaggggctatcagtggtgtgctcaagctggcttgtgtctggcttatgggaactgggtattaaatagccagtcattttgcaagccggttgcaagccggtggtagctggagatcaacagtggtggaaatatttgcaccgtggaaatcagcaaatgctacacattagggccttctctccccaccccacaaaccaaagagctgctttcgcagcagatcactgattgtgaccccttgatgcgactctaaaaattattttaggactcttcagtgcaggcgatgagaagtgaatgtggaaaggttggcagggaagaaacatggtcaggtttgtaatctagaaagacagctctctgtttttggtcttgcccttcaggaaagagacccaagaggggagatttgcatacaggaagtttactggggagtgttcttgggaccagcatttgaggggacgctaacaaagcaggtttgggcaaaggaggagttgaatgaggaaccagctgtaacagattcacctggtcccacagggaagctttggaggtggagtggccctatccagagaggcagagaggtcaggcctttatacccctgtgctgagcatgactggatacaggctgcccctgcagaggggcacataaccatagtgaagtggttctctttccctgagggcagttcctggagaaggctcagcaactagaggagagagtgcctcaggctgaaggtgattctggtggtgcactccagcatgcactgcacaccgctggcagtctggagaatgtatgagatccctggaggtgggtggcaaggaggctgttgggagtgtactgtaatagtccatgttgaagatgatgaaggcctgagctaaagtagcagcggtggggatggaggcagtaggaatgcggcaacaagagtgtaggtagagtctatggacaagttcccctaacgcagtgcttctcaacggagggtgggaggttacccctagggtacatttacaacatctggaagcagtttaggttttcataactggggtagggggagggtgttactggcatctagtgtgtacaggccggggatgctgctgagtatttgatactgcccaggaccatccccacaataagaatgggcaagctcaaaatgtcagtagtactgaatttgacacattctgccctaatgatattaggagtaagggaaaggaagtataagatgcctaccttctctgttcctgccttggatgtctgagtattgaatccacaattcattaccagatagctaaagggaagataataatttacaggtggatagagaagagacctttcatcttgtaagcaaatgcgtatcacattgtttttaaagccctacctgcctcataggaaaatttcaagaaatctagataacagtagattcacatgtctttcccactgtcttccttccagaagattaaagtggagtttcatttctgtttaaaaacacagagataggtgtaggtgaaagcaagcaaataataagacagatgaggggctcttacaatagcctctgttttttgctaccatagtaaaaattttgcaaagaaatagtagaactatggggataattttaaaatggattgtttaggttttagcaaagtagcaaagcagatgatgacaattaaatttaattaggcaaaagcagaagttgattagggcgataaggatttaggtcgtaccaaagcataatataaaatgtctttgtttgcgtcttaacattggcatattcaattatagtcagttggtgatgactttggtgctgtctttcatttggccgaaagctggttattgcatagagtgacagcctcaaccaggtgctctgtgatgtccctgtcatagctaagaagccaacaccatttaagcgttgggacgaagtgactcatggagacactttgccttttgctgggaattacctgatgacgcagagcaggagtttggcaggaacaggagtgcagatttctgggataggcactagtgggaggagaataaaagggagatgcattaattcctggtatgacaaactacgtgatagaactagagcagtggtctgaaaactttttctgtgaaaggccacatagtaaatatttaaaattttgcaggccatacagtctctgtggcaactctgctgctgtgaaggcaggcagatgacaggcaaatgaatccaagtgctgcattccaataaaactttatttaccaaaagaggtggtgggccagatttggcccttgggcagtagcttgctgttaggtgtacttgaaaaaatgattttgctgcacttaaaggaaggtgtggacatggagatgtaggttcgactgtaagactgatgattaagggggtcaaacacattcattttctttcctttattttggcctctttctcctgctcacctctctccttttaagtaatttagaatgcatatgtatgcatatatatttgaattgcttattgattgataattttctattcttttttggaagtcttgaatagtaggagaaaccttttctagtcctctcttttagccctttgtaaatgcaatttagcaatttttgtcttgggtatagttcttagttacattttcttctacttgccattcaccttgggtgtaaattacaattacctgggaaacttttagacatctcaatgcccaggctgagtttggaacaattaatcagaactccagggatagcccaggcatcattatattttaaagcttcccgggggattccaatgtgcagccaaggctgagaatcacgtccttggatttaaagaagaaagaaaagtcctgaacatttgctttagatgctggaataaagaaggaaatttacccatgtaggtaacctttatggccctccagttatagccacaaacataggagttttcagattttaaaggctattttcagaaaaacgtatttcctagtgacacggtcaaaaactctttgttgtggtttggtaggagcaataaaagaaatatcaggaagctattgggatttgactgatgtctatatttctagccagaagcgcttcctccatcagtgagtgtggtgacagcctttgagctttgtgaaagcttccaggttccagtgattaagccattactcctagaagccagtcttaccagagaaaatgatcagggcagatgttctcactgtgtccggagggcatagccttctaacattatcatgggtgcatacataaatgatgatatttctttctttctttttctgagaccaagtcttgctctgttgcccaggctggagtgcagtagtacaatctgggctcactgcaacctccacctcccaggttcaagtgatgctcctgcctcagcctcctgagtagctgggactacaggcacgcatcaccatgcccggctaatttttgtatttttttttttttagtagagatggggtttcgctatgttgaccaggctggtcttgaacccctgacctcatgatccacccgcctctgcctccaaaactgctgggattacaggtgtgggctaccatgcccagcctaactgatgatatttcttagagataacctatttgactaagctaaaggtaatttttgttattaaggcaacataggacaattcaaaaggtaaattcaaggactatttgataaaaatatgtggaaattcatttgaagatatagatatgggtataataatattttgcaggtaggaacattttaaagggatcttatggcattttgcttacaaacatcgttcttttcgttttacaaatagaaggtctaatcttatgacactgaattgctcaagcatttaataggctaaatttcaaagacttagtgctttctttcctaagcaagagttggagagtcattcttactattattatttttttttttttttggtggaggggaggtaagggtacaatgttctgaagaattttccagctaggagcaaactatttttaatgcctattgcaacttcccaagctccattatattggagatatgagagttgcttcatttagtgagggataatggaaagagattaggattctgtccactgcatgtaaacaaacacccaacaaaagtggttgcaacaatagggatttattacaccctttatgaagataactggatttatactgttccagggctgattaattcagtagtttagccatgccctggtgagggatggtatccctgcaattcctgattacctgactttttctttctggtcacaggagggctactgtagctctaaatatcatgatgtaatatgacaacctcgaaaggcaggaagagaggacagtatttctcccctgagtctcattatttttaatcaggaaggaaatcttttcaggagctcccagccgactttctcttaggtttcgaacctggagcccaaagctgtgtcactttttcattctcaaacctgtcctgtcaaaggcggggcattatggttggcgtaaactagggattagcaaactttttctacaaacagtgagatggtgagtatttgaggtgttgtgggccacatatggtctctgcatattcttgtttgttctttttccctccgcccttaaccctgtaaaaatgcaaaaatcattttttggagcttaagttctaaaaactgatttgtttagttatagcatgaccaaccctgcagatatgcctgggactgagtgggttcctggactttcagtttttttttttttttttttttttttaagacagagttttgctctcgttgcccaggctggagtgcaatggcgcgatcttggctcactgcaaactccacctcccgggttcaagcgattctcctgcctcagcctctcgagtagctgggattacaggcgcgtgccacaacacctggctaatttttgtatttttaatagagatgtggtttcaccatgttggccaggctggtctcgaactcctgacctcagtagatccgcccgcatcggcctcccaaagtgctgggattacaggcgtgagccacagctcctgtcctggcctttcagttttaaacccagaaacatccagagcaaactgggtgtagttgatcatcctgtttagtggaccttctaggaacctggctgtggctggtctggagcggtgagtgcctatgcttcgggcctctttggcggaaaataacacctgtgtcttgagatgtctcttctgttccattacagagaagaaacttggttagggatggcctggggtttgtattgagtcttattttaaagtaaggcaattttatgtctttagaacttcaggaaatcattgattctagagattggcttgaattacccttctccattgtaattatcagatattgaaactcattagagtttggtctactcagagctacccaactgtgacgttcataaggtggatggtaattggagggtgaggtgttgttgtgtacagagatttgcttgactggatcaattgttttctcagtggggtctaggcatctggtgatgtctgccctaagtgatttttccccactggtctgtcaccactaaaccctgttatttctacccagagatgtctccccacctagccttcctccttcatcctagttaattgctttcttgtgggtattgaccatttcatgagtactcttaccccacctgcccttatctagagatgtttttcatcactctacaaatccctgccctgcactgctgctgactatcttcctacaacacatctgtccccacgcttccgttttaaagttgtccctgctgcttcctttggacacttccatttgactgataaatgccagcttcttagcttggacgccctacctgacctactgcttcacggccgtgcatacggaatcctctcacaacccacgtttttgcatatgctgttcccttctagaacatctccttttccttgtggaaccatcctctctgatctaaatcaaatgtcttctctgtgagacctcctcagcaagagttcctaccccagagagacttcagcatctctctacaatggtggtttcttctgttgaaggatgcagcttgggatttagcagatcaaagcatggcccctgctagtccttctaattacctttgtgcattaacaggaagcatttgaggaaggactcccacgccagcaccattacactattttccctgtcttatctgatgcctgtggacacgtttatcccctaggttgagtggtatttacctggaaatcttcagtgtttggcccacagttggtatttgtatgaatgtctgaatgaacataggagctcaagttggaattttcataggggatcctcttcttattaaagtctgtccttccctgggggcttgctactccaagtatggtccctggacttgcagaccagcagcctggcaacatcagggagcttgttagaaatgcaggcttgcagctgggtgcagtggctcacacctgtaatcccagttctctgggaggccgaggcaggaggatcacttgagctaaaaacaaacaaacaaacaaacaaaaattagctgggcacggtggcctgtgcctggaatctcagctattcaggaggctgaggctggaggattgcttgagcccaggagatagaggctgtggtgagctatgatcacactactccagcctgggtaacagagtgagatgctgtctcaaaacaaaaccaaaaccaaaacaaaacaaaagaggcaggatctccaatctcaccccagagctgctgcatcaggatctgtcttctagcaatgtctgcagaagattcctgtgcacattaaagttcgggaagcactgctctaggctggtctcaaattatggcccattactacctataacacaataccttagaattaagggagtcctaacaaaattgcaactgcctttcttccttccttccttctgtccctccttctttctttcatttttttcttggaggcagaatcttgctctgtcgcccaggctggagtgcaatggtgccatctaggctcactgcaacctccgccttctgggttccagtgatcctcgtgcctgagcctcccaagtagctggggctacaggtgcccgccatcaagcccgctaatttttgtattcttagtagagatggggtttcaccatcttggccaggctggtctcaaactcctgtcctcaagtgatctgcctgtctcggcctcccaaagtgctgggattccaggcgtgagccactgcaccctgccgctccttctttcttaaaatgtacattcaaggacctgccctctacctactgaatcagaatcccagtggggagggccactgtattttaaacaaatacctcaggagattcttatcaccctgaagtataaggaccacattccagggcaaattttaactctttagttgtctctgattttccccaaaaccgtggactgaagatgctcaccttcaaaattagtgttaactctgttgtggtctatacccatctacctttccagtttccctgttgctgttaatagcactatcgttctcctactgtccctagatttctacctggctttcattcccattattgaaatactcttaccttgtgcagtgtctccacgtttcaggaaagaaaagaagaagtttttgttagcatctgtggccttttctagtaattgtcctgtttctttgcaggtgttactttcctgtcaagttcatggtgtgtcgcccctgtcctcgttctctgttgtagtctgccttctcttcccacttctccaccaaaactcttctctcaaaagtcaccagggacttccttattttcaaattcactgaccttttggagcacattaaagcaaacctcttagaggttggcaaccttataaaaaaatttgtatttggttctaacctcctttgctggtgtgcaaagttgaacatgaatagcaacctctaagccagagagaaattggatcttactgtgtctttacttgccagcccccagggtaggaaagtagttggtcactgaaagtttttatacttaaaaacgtgttttacaaattcaggtttactgtgattttttttaaacattaagctagttattttaatttctaattcctttgattactgaattccttcaggcaaataattgcctgtacttttcttgtgatggttaatattatgtagttgattctaactagaattttcccttgttttctggaatgcacccatattcagagtaactaaataagtcattatctttcctttgagaatatgggaactaaatctttacaattcaaggaaaagagaagaacttagattaaaaggaaatagaataagaaatacatacactggggatcatgcctataatcccagaactttgggaggccgagataggtggatcacctgaggtcaggagttcgagaccagcctggccaacatggtaaaaccctgtctcaactaaagatacaaaaattagccagatgtggtggtgcgtgcctatagtcccagctactcgggaggctgaggcaggagaatcgcttgaacccgaaaggcggaggctgcagtgagctgagattgcaccactgcactccagcccgggcaacagcaagactctgtctcaaaaaaaaaaaaaaaaaaaaaaaaagaggaaaaaaagaaatacacaagaaatacatagattgcaaggtgtctttcttaaaaaaaaaattttgtttccttcttcgctgcctccttccctcccttcctctttttcttccttcctccctttccttcatcctgccttctgccttccctttctccctccctttcttctttccttttcccctccttcctcccttcgttcctctttttcttccttccttcctttccttctccctgccttccaccttccctccctccctccctccctttcttctttcctttttaccctccttctctcccttcctcccttcatctttttctttcctccattctttctttttacgtattcatcagacacatcccagatagcacattaggctctggggatagagcaatgaaacaaaagtggccccttgcctttgagatgcttccagcttagcatggggcagtcctgtcatcaaataaacataacagattgctaaacatactgggaaagtcagggtccagtggtgaggggagggtgtcatgaaggtggggtacatggagaaagggtggaaactcatattagaaggacaggtgcttgagctgaatgtcaaaagtttgcaccattaggaagacggaggtatttaacgcactgcagatacatgagcaagacccggaggtgtgagattacctggtgcagctgaaggagtattgagagatgaggctggggcaagcaaggaggaacgtgttgggattttaatgtgggaagtagcatgaacatatgtctgtgatggaggacagtggataggagaagtttactcctcaaaaatgagagatcagtaagaaaaccagtgcaaaagtctagctaagacttgttagaccagggcacagtattttgttgttgttgttgggatagggtcccaatgtgtcaccctggaatgcagtggcatgatcatggctcactgcagccttgacctcctgggctcaagtgatcctcccacctcagcctcccaagtagctggaactacaggggtgtgccaccacccttggttaattttggtgtttttgtagagagggggtgtccccatgttactcaggctgattttgaattcctgggctcaagagatccacctgccttggcctcccaaggtgctgggattacaggcctgagccaccatacctggttggggtgcagtattaagaagtgacatagagtggtagaaacctggagaataggttgccgtgggtgagccgcacggggaaagaataggctgaagacagaatcaacctttgatcaggaggagtgaaggaagagctccttagagaagtaggatgtgatacagattcaaaacactcaatatccctttctgactaacaagaaagtcctttttctactataaaaagcatatagtaaaagatgtgagtggtattcccttattcctttgccttctggagtaactcacagcaaattgactcccctttcaacaagacagctcttgaaatgattgaaagaaaactctcatgactttccttaatctcttcctccctggtttatgtactcctgggtgtcctcactgctctgtatgtgacatggtttctaaaccactcacctgccctgtgaacatagccagcagcacgtggtcccgatgcaatggaaagaatgagggcagtgactggccctgtcttcatccttttctccttcagcggagatttatttcttccaatttctgcagccaactctgtgggagttgttgggttggtgaacccgaggggtggaagagacagctctgggaccactgaatagcctagctttgtttaggggcatgttttcctgactgtttatggtgcctgacagggttgtttttgttctggggagagctcatttgataaagcaggctgctgagaaagctgtggggctccactttttctggggatatctccaaggccccccagggagctgcgatttagcatcccgcaggcaccccttgctcacggaggtcatctgaggccctttgcatcctcgtcccaagtctaactcagatagtggaggggagagaaactgttgccagcttcaccagcttaatagtagtcaggaaggagttcaggccagcaagattccattttaatcgtcaatcacacattaccaaataaaaaagaaagaaaaagctgcagctgtgtgccactcttcataacttttcctccgtggttggcagtcagattgctttcttttgcagaaaacacgatgtcaggtttagtcagaatttatgtgtagaaattcgcaaggaggcagtttggaaaggaaggtgaaattagtgaggttttagttcgcacttgggacgaattacagacattcgggatggtggcatgcgaaagtatgctgcattttccttctcagcgccccctgcttcatctcatagccctgggcacattgcagaatccttcacaggcagggtttaaatatagcaaggcacaacactggccatagaggacacgagaacctctacctcagttagcaggggacaggttagcacctcctctatccaggggatggactctggtcagctgattggtggcacgtacattattacgagagtaaagagatgcttggctggtctctgtggactccagcacatgcagtccctccataaaacgacaagagaacacagtgtgctactgaacgccactagatctgtattgagccatctacgttttcctctagagccatgacaaagatggtttttcaagtgaattctagaccagccatctaaggagctttaggttcaagtcccatttccaccccatttgagtttgacggccttgggtcaccttctcaaccactcagaactacggtttctttttcaatatgtgtataggccatggatatttttgccctgcatacgtgaccctgtgtgattaagtctcggcctcatttctgggcctctcctgcactgttctcctttttcacactccgggcgtcagctagatgttctgcaaagcccttggattttccaccttcatgctcttgttcttgctgctttccttccccttgcccttagaatgcccttttctccatatttgcctttaagaagtcatgtttttggccgggcatggtggctcatgcctgtaatcccagcactttgggaggctgaggcgggcggaaaacgaggtcaggagatcgagaccattctggccaacacagtgaaaccccatgtgaaagaggcccagcaatgacttgtctttttttttttttttttgcctttcatgggcagcacgcagggtgctttctggctgataaatccatacggtcaggattggctgactccttcacggtaatgggagatgtatttgacactgctgcccctgctgacctgtgggtgcaccagccaccgggacacctccatgagacacagtgttagaggtttatggctaagaaactgatttgaagtgtgtgaacgtgtgccaagaaaaaatgattcggcttttgttattttataatgttcagataatcaatatgaagcatttttttacattttgctttcacgtacatatatgtatgtgtgtatatatatgtgtgtgtatatacttatatgtatatatatatcactatataatagtgaatatatgtatattattcactaatatacatatatgtatgtgtatatatatgtgtatctataattatatgtatatatatcactatataatagtgaatataagtatattattcactaatatacatatatgtatgtgtgtatatatatacacacatatatgcacacacacacacatatgtatatatatatacacacacaatcttggctcgctgcaacctccacctcccacgttcaagcgattctcctgtctcagcccccagagtagctagctccctctctctctctatatatatatacacacacacatatatgtatatacatacatacacatacatatatgtatatatacacacacacacatatatacacacaaatacatatatgtatattagtgaatctacttagaaagaattttattttgaaaataagctataaccaacaatttgggaggccgaggtgggtggatcacctgaggtcaggagttcaagaccagcctggccaacatgatgaaaccccatctctactaaaaatacaaaaaattagccagggatggtggcgtgtgcctgtaatcccagctactctgggggctgagacaggagaatcgcttgaacctgggaggcggaggttgcagcgagccgagattgcgccactgcactccagctatacattgcataggctcaccagtacaacaaaaccagtttgttgattgataaataaatatttaaaatattgtatgtttttattttattttttaatttatttacttatttttttgagacggagtctcactcttgctcaggctggagtgcagtggtgtgatctcagctcactgctgcctctgcctcctgggttcaagcgattttcctgcctcagcctcccgagtagctgggattacagtgtctgggtcttaggttcctcatctgtcaaatggagacagtaatagttgattacataattttcatgaagattaaatgagttattgcacgtttagtatagtgctttccccttataaacactcactacttatttttattttttattttttacttttgagacagagtcttgctcttttgtccaggctggagttcgagtccaggctggagtgcagaggcacgatttcagctcacttcaatctccacctcccaggttcacgtgattcttctgcctcagcctcttgagtagctgggactacaggcgtgcgccgccacgcctggctaatttttgtatttttagtaaagatgaggtttcactatgttgcccaagctggtctcaaactcctgacctcaagtgatccgcccatctcagtcccccgaagtgctgggattacaggtgttagccgccgctacttatttttgtaagatgtccttttatctttgatagattatgtacttatttatttatttgagacagagtctcgctctgttgccccagctggagtgcagtggtgtgatctcagctcactgcaacctctgtctcccgggttcaagcaattctcctgcttcagcctcccgagtagctgggattacaggcacgtgccaccacgcccggctaatttttgtatttttagtagagactgggtttcaccatgttggtctggttggtctcgaactcctgaccttgtgatccctccgcctcggcctcccgaagtgctgggattataggcgtgagccactgcccccatccagactgtgcatttatttaagagaataaatattgtgttcatttttacagacccccacagagcctgatgcataatagctccttgataatatttgttgattgaatgaatggtagctattttaatggtcagagccacctggactcatttaagttgcaatctatgcatacgagattggaccatatccaggcaagaattccagattcatcctgtccttgtcagtaccctagttgggttaactgaaatgactgcctggaacacaaagtctttaataaaatgatattactatgctctataaatctataagttacagcctgcccttatttcccttatttaaatttttcctgccctcttgcattttgtatcaaaagcaacctaagtttaataacttcagcaaaggtaaacatttcttccttttgctttaagattcccagtgtatgtgtattcaatcagcaaatgtttgtgaagcgacctactgtacacttggcagcaggctgaaagacaaaaggccacctcctgatacatccttattgctgattttgttaatggtagaggtgacaaggtaggggatgcagaggagggatgtgcccttcctggtgatgttttgtttttttctttttttttttttgaaacaaagtttcgctcttgttgtccaggctggaatacaatggtgcaatctcggctcactgcaacccctgcctcctgagttcaagagattttcctgcctcagcctcccaaatagctgggattatagacgtgtgccaccatgtccagctaatgttttgtatttagtagagatgggatctcaccatgttggctaggctggtctcaaactactgacctcaggtgatctgcccgccttggcctcccaaagtgctgggattacaggcatgagccactgcacccagccctggtgatgctttttagtgcctctaattcttctgagccttttcctccacttcttagaaatatatagacctttggctgggtgtggtggctcatgcctgtaatcccaggactttgggaggccaaggtgggtggatcacctgaggccaatagttcaagaccagcctagccaacatgatgagaccccatcagtacttaaaaaaaaaaaaaaaaatgcaaaaattagccaagcatggtggcgcacagctgtagtcccagctaccagctactcgggaggctgaggcaggagaatagcttgaaacaggaggcggaggttgcagtgagccaagagcaagccactactccagcctgggtgacggagtgagactgtctcaaaaaaaaaaaaaaagaaaagaaaaaaagaaatatatagacctcctctttccacccccttcctctagtagcttgtcctttatcttcccttcctctatggaaaagcatattgtaaattaaagaagtcaaaaatgcaagagggtattctgtatttttacttttactatgatctccgttttcccagaaagtgtgtagaccctccttatcatccctcagctctattccttggcccattcctttctggaatttgtttctcaagccatcggcactgcatcccctccagtggtttgaaaccgggcaagactttgcattccaaagcaaaagtggaaatcagatgctcttagcaatccctgtgaatgccgggaaatcccgtggcattttcttacagaaacaggttatactgggtggatgggtttaaagcattattcacaggactaattgtatgacttggagcagcctcggtttcctcatctttcctcatttttcctcataaaatgacttctactcacttaaggcctgttccaggttcaaagatctaggattcacttatgttatcagttaaataggcttttgttgggctgatggtggaggctccccattgaaatattgtgtatctgggaaatatatgcagagctaaacaatcagattaacgagtgaacttttgatgtaccatctgtttattatggtggttctaccatgaaatctgttgcaaagataatactaacaaagcagaaaagtgcatcttaatatttacatggattacaataagaattggtaatgactcatgaactggtaatctcagcggctcccattctatccttctggttaatgctttacttgaagctgagttttgttccactaattatttcttcatacctgcatcctaggcagtaataaaggggtctctatataaggcaaagaatatggaattaagtaagcgaggtaccatatatgaataggtacaagaagagactgaaacatgttagaatttgtgttttgatacttgtcagggagaactcctgggatgatgttttacctaatacttaatgatatctgactgctctgctctgcagggagcacagccatgtggtgctcattggctgatgtttgttaggaagtgggccatctgtagccaggaaggcttgagataatcaggagggggaaagtgggaggagaatggattgtatggagctgtgaaatgccattgtggtgagtttcctttcattgtgtattgattgggttttctagaggacagctctggactgagtctttttccattttcactgttgctaggttgactgttaagtaatgcttttagacttcttggtgagacaactgagaacatcctggaactaccatactataaaaatgttaatgtgtacatatctatgtataacagtaactcccaaatctcagtttttattcagtcttttccttgaagcttaagaattgagtaagcagttgtttgctggatttcttttcttagtttcgtgttttttttttgttagagtctcactctgtcactcaggctggagtgcagtggcatgtgatttcaactcactgcaacaacccaggttcaagtgattctcctgcctcagcctcccaagtagctgggattacaggcatgtgccaccacgcccagctaatttttgtatttttagtagagacgaggtttcaccatgttggccagactggtctcgaactcctgacctcaagtgatccacctgccttggcctcccaaactgctggaattacaggcatgagccatcacaactggccttggatttctttacctggttggtgcctgaatcttaacctgtttcagcccaagtgcaccccttcccgcattcctagattgcttctcctgtgatagtgttctcagttgttacctgctatttccctagaaggacctttagtgtaattcagagttccttctccccatctctaccatcactaatccaatccaggcccttctcatccttcatttgagcctctgctgtaatctctcaattagttttcctgactccagtttcatcctctatttgacccactctccatctgccaccagaatgactaaggaagtaattcaacaaccatttacgagccaattactcttttcaggctgggataacacagccaacaaatcactgtttctgctctcgcaaaacttagtttctagtactgaaggccaataaagctgtgtacgcaaacataactaatgtgtttataaactgttgcaaaggaaacaaaccaggatttgaggtggaggatgaaagggaaggtatcctttgcgtagggttgatgaacaagggctgtccttgatgatgacatcgaagctgagttcgaaaaggtgcgaagaaactagaagaggaatgaagggagccaggggtgtccaaaggagagaatacagttatgggttcttagtttctgtttctggttgggccagtaaagccccttcatcatccctcttttctgcttatcactagagagagaaactaaaaaccatgatttcaggctgcaaaaagcctaaaacaaaacaaaagaaaacagaacaacaaaaacaacaaaaggcgggttgaacaagcaatccagacagaatgaacagtctgtgcaaagatgtgtaagagcttattggtttcaaagaactgaacactagaagagagtgattaatgcacagagcaattgaacaagtcatgggagatgggatcagaaaaatgggcaagaatcgtgttacagaggcccttgtggtctgcagcagagagtgcaggacctattttctaggggagaatagaccccactttcttgtaattgtggaaatgagatccctgttttcttgctggctgtcagttgaggactgtcgctaggttctaggggccacatgcattccttgagttctgtccccttccttcatcttaaaagcctgcaaggctggtcaagttcttctcacattgcatctctctaaccaacccctctaccttcctcttccacttttaaggactattttgagcccgctcaaaatatccaagtaatcctgatcaatcattaactttaatcacatctgcaaagatcgttttgtcatggaaggtaacatattcacagaatctgggaagtaggacatggacagctttgagagtggagtggatattattctgcctaccacaaaggtagagtcaaatgagaaaagtatctataggggtccaggtgcggtggtgcacacctgtaatcccagtgctttgggaggccgaggtgggcggatcacgagatcaggagttcaagaccagcctggccaacacagtgaaacctggtttctacgaaaaatacaaaaaattagccaggcatggtggtaggcgcctgtaatcccagctatttgggaggctgaggcaggagaattgcttgaacctgggaagcagaggttacagggaatggagatcgctccactgcaccccagcctgggggcaatggagtgagactccatctcaaaaaaataaataagtaaataaagagaaaagtatctttggggtggttgatgaccttgacaagagcttttttggacatatgatggcaaaggagagccacatcatggtcggtggagcaatgaaagcagaagttagaaagtagaaacaatgggcctggcatggtggctcatgcctcatgcctgtaatcccagaactttgggaggctgaggcgggtggatcatttgagtccaggagttcaagaccaacctgggcaacatggcaaaaccccatctctacaaaaaaaatccaaaacgttagctgggcatggtggtgtgtgcctgtagtcctagctactcaggaggctaaggtgggaggatcccttgagcccaggaggtagagtttgcagtgagcctcatcacaccattgcactccagcctggataacagagcgagaccctgttgcagaaagaaaaccataaagtagaaacaatgtagtgtgtagacaactctttagataacttggattatggctggaggggatgtggaatgaactgaagcatttttttaggcaaatacaaatgatgtttactgataagaataaaccaggcaaaagtagcatgatgatgatactcggagcatcaccaagatgaggccctggaatccttcatccagggaggatagatgcttcatccgtcagggaagggaggaaaccctgcaaggaagcactggaatctttcccaggacaagagtggatgaatccagagccagcagagagcttggcctttgatgggagggacatgcccccttgtgtatagaagggaagatggaggatttggatgctttgtgacattgtgatgggagataagtgaagtgccatctcatggcttttattttgtcaatgaagtatgaagcagggcatcatctaacagaactgtgaccataccaaccttgcttcaaactcctcaacggcactacctgcttacctctgtttttgtttcctggtgctgtctgcctagaacttgacactacctcctcacacattctgcctagccctctggacacaccacacctctttgcttttgatggtgtgtttgcttatggcctttaccagaatgccttgcctcttctcactttcccttttaccgtctcccatccccacctcccaatgcacactccttttccaggaaccagccttgaaacacaccctcaccctggctgtttataggggcagaggccctggtgctttcattgtgaaattcacagcacctaggacagtacctgcacacaggaagagctcagtatatgtttttcaatataataacttcattgcaggtaaattaattgattgagcatatatctcaaactatcaaaatagggtaggaaaaaaatgaactgtattaagcggaaaagaactgttgttatactctttgatgacttggtatgatttcattttgctcactctcaaccaccagctttcagtgggctcaagcattcaaaatgtcaactttacaaagtcatgaaatcaacctaagcatccatcagtggttgactggataaagaaaatgtggtgtatatatatgccatggaatactatacagccacagaggagaatggaattatgccttttgtagcaacatggatggagctggaggccattatcctaagtgaagtaactcagggacagaaaacaaaatactgcatgttctcacttatatgctggagctaaacagtgcatacataaagatggaaataatagacactggggactccagaaaaggggagagtggaaagtgggtaaggattaaaaatattacctactaggcgcaatgttcactattcgggtgatgggtacactggaagcccaaacctcatgattatgcaatacacctatgtaacaaactagcacgtgtacccttgaatctaaaataatagaatacaataaaataaaggaaaacaaaaaaacccaaaatagcaaataaaaaattccataaataattcatatgttaaaaaacacaacaaagtgtcagctttaaatctgtattattctgtaggctgtaaagtctgtgagagaaaagattatggttcagccctccttgtattgtcagtacttgacacaaaatataaagcctgtagaaagtattaaaatgtttagatgaatgatttcgtatgatttaaaaattactatctgtttctagaagctgcagtatctagcacatcttccccgcggggatgtccttctgttctgattggcctttagagaaagtagtctgataccaccctgatttttatctctttatccatttcagaggccttgggttattctgagcatgttgatttcaagtcctgtaaagctgagtgacttaacatatcgttcttcaacttggtgtttttaaagagccaaacatattcacacatgctacaaatgcatgctagctctgcatttggttacttgatgagttcaaaagaagctcaaatctcagcattaagcaccatactccctgttacaaggccgcacatgtacccccgaatctaaaaaaaaagtttaacattaacaataataaattacaaataaatatgcatcgttataagcaagatttgtagtgcagtaggtccttgaataatgccatttcattcaacattgttttattatagtgttgatgagaaaacaaaatcggttcccaaccagggccgctgtcagtgtggagtttgtacattctgcccgtgtctgcaagggtaacctctgggcactcaaatttcctcttacatctcaaagatgtgcatgtggattagtgggcatgtctacattgtccccatctgagtgagtgtgggtgagggtgggtgcaccctgagacgggatggcatcctgtccaggttgggtcccagctcagtactctgagctactgggataagatctggccaccctgaactggagtaattggcaacatcattatcttacttgttttattcttttgttttgaaatggagtctcactctattgctcgggctggggtacagtggtatggcctcggctccctgcagcctctactccctgggctcaagcaatcctcctgcctcagcctcctaagtagctgggaccacaggcatgcgccaccatgcccgtctaatttctgtacttttgtattttcagtagagatggggtttcaccatgttttccaggctggtctcgaactcctggactcaagtgatccacatacctcggcctcccaaagtgctgggattacaagcgtgagccaatgcgcctggcctattcatctttcttaaatgtatgcatagcccactttcacttcagtgttaatattagatgtgtcttggtctttatttagaaatctggttattttttgtgatcagaaatatgccgtaggaaacttattcttgtttatattaattagcctgtggtaaaattgatttcattatatgttgttttgcttaaagtcacagttttcaagaaactgttgaaaatgttaagtgagtacttaactgtattttgagtggaataatttgcaactgaaaaaagtttacaaaaataggattaatttctgcagaaaatgttcacagtaaaatgccaagggataaaaatggtattaaaaattatatacacagtatggtcttaattttaggagaaaattctatatctatgcaagcatatatagttataggtttgtgtacaaaaatggctgtaaagtaatacaccaaaatactaatagcagttttgcctgggtagtggaatttgggtaatttcagctttcttccttatacctttctttattttctaaattttataataaatattttctttttgaactcaggaaatctatggtatttatttttcaaggtaaatttttctttaagcatcagtggtaaaattacttttgtccccctccagtgttgaagagtgcaagaaattgggagtcctaggtttgaaatgtttttagctaagaggactagagaatggcagttaatgtacatcaatgataattgatccaggagacgctttggagttgacttaaaatgtaaaaatgtgttcagggttcaatatatctattttcaaggtgttattgatcagatctgtttggtttcatcacctctggcagatgttccagtggtttcttaggagagcctccctctaccctggtatgtgtgatcgtaagccagactttctgaatgcagcttaatgcccaagaccaaaatagactagtgagtcacttggacatattctgaatcaaagatttaaaaaccaaagcatgcaaataaatgctcctaatgccttagctcagagtaaacatcagttaattttaattttaaggctagccaaatggctattgcttaaggcggccagagtgatgttaatgtgaagagctggctccgtatgggcaagggctacatgttttggtgtgttatggtatttatggtatgctatttcattttaattaattttgtgtattctctatgatactaacacaatgttgggcatgtacaaagtgctgagtcaatgacagagaccagagcagaggagagtaatataaagtactgattgatgaggatgtcataggttggctgagtctgccctgcttcgtggcttttgtcttggtttaatcattaatagtatcctcttttactctcaaaagtctttcatttggatgattgttttatagggccactttttgactgaggtggctgagtaaaatcttctagattccatgcgttcatctctgcctgaacagcagttgtctgcctggcaaaaatgtaagagccacacccaaaagcacatgctttttaatgctccctctctccttcttaccctgcgtaatggctgcagttttgtactaagccttttcagatagattaaatggaactgttgaagaagccctagaggattaaagctctggacaagttgatctctttctatgaccacagctgttccagatggtggtaatacttctaggaccctgaatgctgcatttggggccaatgggatgaaatcccaagagcacattgaaactgacaagctgccttgacatttgctctttagctcctaagccatggattcacttcttctttatggcggtttgcacttctgtttcctttattccttcagggactcctgctccatcccctttttgctttagaagaatgagaatttaaaaggcagcatgtctaattcactgaggattcagtgccccttaattgccttagaagcctgaaaagtcaggctctaggaataagctcagaggactcaaattgagacaaacatttgtattttgacaaaagctgtgcagtcttctgattcctgccctcaaagcagagtgtaataaatgagattgagaaaacacttgtattttctgaattagggtttaagttcctggaaacctcttgttcttgtttaatttaagattgaaatctgtgttttttttttttttttttttttgagacggagtctcactgtgtctcccaggttggagtgcggtggcgcgatctcggctcactgcaagctccgcctcccgggttcacgccattctcctgcctcagcctcccaagtagctgggactacaggcgcccgccaacacgcccggctaattttttgtatttttagtagaaacggggtttcaccgtgttagccaagatggtctcgatctcctgacctcgtgatccgcccgtctcggcctcccaaagtgctgggattacaggcgtgagccaccgcgcccggccctgtgtttgtttaaaaatgaaaatggttctaaacttttcttgggtcactgagccctctgagaaaatgatgactgaggattttctcctctcacgtgtgtacacacaaagaacattttatatataacttcagaagtcttatgttgcctattccactctggattgtaggttaatataggagatagttggttgcctttcccatatccatgctctgtagcctgcattccttcttcctaggagaaaccttattatctccaggtagctcaccctcctccatgggatggtgtgtttgagagggggccctggcctctggtcccaggggtggtggggatggaggagaatgattggtctaaaccaatcatgatggtcccctgtctcctttgctagagactggttcagccatgggtatgtgatacatttctcacaaataagaggagtgtaatcctgccgggtagctttgggacaaagtttcatcactcttaagatgcgaaccatgtagtagtatggatgaagcaatctcgaaaccctttttaggtgtataataaggttgagcaaatgagaaaaggcagaaatagccctatggagtggattggaattggcatattggtgtgaattgaatttatgatttctaaaatatgcaagtgaatgcatatatgtgtgtttatgtgcagatgtatgtatgtgtatatttataaatatgtgtgaagacatatatatgtatagtatacatacggtcatatatttcctagctctgcctcttaaaaggaccaagaagaaatgagatcccaataacaatgagaacacctgctacccagattctgacaccattcttcactaaaaaacccctcaaaaacaaaaccaaaaaaccaagctaccttgcagaaattccagggccggggcgtgaatcaaggtgatactggaatcgcagattgtgtttctcaggctagtctcctaactaagcctttaacaggccaatccagtcttcagttaagctggatgcttgtgaatgaggtggtatatgagaaaactcatggagtccctactcatacactcattgctgcacctcctttgacatatatcgatccctgggtctgaagcaatgttgtgtgggatactacactgatagattaggcattcttatgttctcaaatagtggcacttgcagagaccctaaaggcagagaaagcaaacccaaacctggagtacatgtcaatttatgtaagcatgaatttctatctcccctctcctttttggggtggaagtggtctgttatgatcagcctttccccaagggcctggctgatatccgtgaaggtgctatagagattggcatctccctctgccattggttggctggaccattcagcagtggtaatagctaggtcattgctaagagaaagcccacaataccgagcccacatacagcctttatcctgccacctgagccatctcatccatgggcccattgtgctagcactggttgtctgagaagaagactctggctgacatccacaggggagtcatgcattcaaccagccaccactggatcttctcattcacatggcttgagtgacagggcagattgtaccagagcctgctgctgctgagtcctctcctgctttggaccacatttctgctgtctgctaactgaatacagagcttgaaataaagaattgcatgcaagagacttatttgtcaatgtgatcccaaggagtaggagggacgaggggggatgaaatagggaaggaaggaaagccagtacagcggccatgctaggtacaactgatgttcaatcccatcagatcttctaggagactcatgaaatttatctcagcactgtaaggaactaatggggttatcgtctcctgtccatcattgttcattggtcacagctggtcccacatgttttagctcccaggttgtgcatgtcagctgtcccagaagctttcttcaggtgtcggagaagtctgagggcaggagtccagagatagaaggcatctggtacagccaaaaatgaggtgccatcaagttgcacctgtttggaagttggttggaacctctgctggattggaaggctgcatcggggactgaagtgggaggtgagaggagataaattaggagtgttacataaattgtgtcccatgcacacactacactccaaagggtctaatgaggaaaatgcaggctttgaacaagccacacctggctccactcttatctagttgtaatactttggtttatttacctgactattctaaagttcagtttctcgtctgcacaatgaggatatcaactcgttatgcaactgggagagttagcagatgtgacatctgttaagttcctgctttgggcctggtattgactatgcaaagcagcagatgcacagataactttctagtcttgtagatggaagggaagggaaggagatagtggatgagggacgggttcataggaagagggcattggacaaaaatgcaggaaaaagaactcttcataaacagagagtggtgtgcatgtgttacagggagagaggacaggtaaaggtgttaaaggtggcaagattagtatggtcaaagtagagtccagaccaagattgggtgtgttccaggaaatagcgggacttccatttgagtgccttatagttatttcttaggagtggacacagaagacagcacagctggggtaggcgcttgaacgccagtttgaatagtttgaattatacttggtaggcagcctagaaggagctatagacaacttctccaaagactggaaattcaaccaaagaggccagtttgctttctagtttccccattccctcagctcattcaggccacgcaggaagttaccattgcatatgtgtccttcttgtagcctctggggatatcactgtgtaacttactcattccagaagagacatatgggaagatgggggtgggcaggagtagggggctagctctcattcatgttttactttctttctttttttgagaccgagtttcactcttgttgcccaggctggggtgcagtggctcaatctcagctcattgcaacctctgcctcccaggttcaagtgattctcctggctcagcctcctgagtagctgggattgcaggcgactgccaccatgcccagctaattttttgtatttttagcagagatggggtttcatcatgttggtctcgaactcctgacctcaggtgatctacttgcctcggcctcccaaagtgcagggattacaggcatgagccacggtgcctggcctcatattttactttcaaggcgtagtgtatagtgccccgtgctaactaacgtatagtaagtactgagtaaatatttgaggagaggatgagtgaatgaaagtgctatgtatttatctcttccagttcttttcttggtggcactgttagcttatgtggctccttgggtaagacatttgcctgccttgtgccagagccagccgtgagctagcacaggggcgaacttctcttaggttctgaggttgaagactttggacaggttttgagcttagatgcatattgaatgtgtgtgtctccatttttctttctaggtctgatgtggctgtgtttcagcctgtgcttatacagtattcaattcactgaaaaataatgtggttgtgtaaacactcagaaggaagtgtggtgtgaccggtgatcacagcttctgccagaatatctagaacaggatgcattctgcgatgaaagagatgactacaatagctgtagctatttattttataaaaaaaaattcttagccctagttcatggcctacttcttccaagcagtacaggtcaagcatccctaatctgaaaagctccaaaatgtgaaactttttgagcaccaacatcatgccacaagtgaaaaatgccacactcgggtacttaacacaaagtttgcttcaggtgcaaaattatttaaaatattgtataaaattaccttcaagctatgtgtaaaggggtgtctgtgaaacataaataaactttatgtttagacttgggtttcatccccaaaatatctcagtgtgcatgtacaaatattccaaaattaaaaaaaaaattcaaaacacttctggtcccaagcatttcagataaagtatattcaatctgtattaaatgtaacaaaatttcagtaacatgacagaatctgagcaatgacttggaggcttatgtcactgattttgccttactgtgagaatatttggggagctgagcccaggaaatgtacttttccttttgttcttttttttttttttttgagatggagtctcactctgttgctcaggctggagtgcaatggtgcgatctcagctcactgcaacctctcctgggttcaagcgattctcctgcctccaagcaattctcctgcctcagcctcccgaatagttgggattgcaggcgcacaccaccgtgcctggctaatttttgtatctttagtactagagatgggatttcaccatgttggccaagctggtctcgaactcctgacctcaagtgatccacccggcttggcctcccaactctagctgcagagttacttaactcttggctctttcacagtataaagggatttggagaattaatctgatattcccaggttgaattttttttatttgttcataaaatttaagcaaaaagtattttttaaaatcttccagcaattcagggccttatgttctggagagccgagcattctaaagaacgtagcatcatttcctagaattttgcatcggtaccctgagctccttcatgttctttaactttcgttccccagcacatgaaacaccatggcagcaacccttattgcttgtggctacttctacgtccctcctttttttcacaggacattccgttcttctcaccagccctaacctgtttgccacttggcaagcacggggaacaggactctccacagtcttaccccggggactagtttcagcttttcagagagcaaagcttctggtccaacagtatttggaaattgagacaattgaggagaagtagtaatatgttcaactgcagagaatgtagcctttggcatacaaggaggaagctgtcttggcatctgtcattagagccactgggtattttggaaaaagtccatttcattcttcctctttttggatcctgaaacaagaagctatagtgccatcaggaatatagagattgggaagcatgggaatgattcaagtaaccttctgaagaaagcgtacacctccagggtagctaaacaagcagaatgcttgttggggaagcaaaatcatctgaaaacaacctgaatttggaggtaatagaaaaaaaaagtttttttaaaaattttatttaaaatggaaaaatttaatggtaggatgggaaagtagtacttctagcttggttttggattcagacctggatgggaatactaactgttagaacttgagaaaacaatgttagcatctaaaccttagtttctgaacctgtgaaatgagagaataatagttcatttgttcccttttgaaagatgtttaaattgtggtaaaacacaacaacatagaattatcgtcttaatcattatagtataattcagtggcattaagtacatccacattggtatgcatctgtccccagaactcttttttcattttataaaactgaaaatccacactcattaaagagtaactccccagttttttccccctcctccagcccctagtagccatcactttactttctgtctgtatgaatttgactactccaggtaccttgtttaagtggaatcatacagtatttgtcattttatgactggcttattttacttagcatagtgtctccaaggttcatccatgttgtagcatgtgtcagaattccctttcttcttaaggctgaataatcttccatcatctgcatgttgtctttatataccatattttgtgtatctatttatctgtcagtggacacttgggttgcttccaccttttggcaattgtgaataatactgctatgaacatgggtgtacagatatctccttgagacccgtgtgttagtttgctagggctgtcataacagagtccctagactgagtgacttaaataacagaaatttattttctcataattctgcaggctaggcatctgagatcaaggtgttattaggattaatatcttctgaggcctctccccttggcttataaatgactgtccctctctatatcttcacatgatctttcctgtgtgtgtgtctgtgtgtccatgtccaaatttcctcttcatataaggacaccattcatattagatgagaacccatcctaaataccatatcttaacttagttacctctttaaaaatgtatttccaaataaaatgctgttctgaagtactgggagttaagatttcataaattttgtgggaatacaatttggcccatgataccccactttcaattcttttggatatatccctagaagtggagttgctagattatatggtaatcctatttttaatttttttaaaggacatagttcatttttatagggtggctgtgagatttaaatgcccgtaaaatttctagtgtagggttggccccagaaaaagttgacttcaattagctgtataaactgtaaagttaactattctgatccctggatttttaggcaaagaaattgagtccacaaaagttaggcaacttatgtcttcaagtttctggttagcatcagattcagaaaaataacctaggttttggcaatgtcaggactgttgataccaccatgcaccatttcttttcagtccttcatagactgttcagttatttgctattaactattttctggcttttatggtatgtgatttattatttttttaaacttagttttctgaataggtactatattcacttggttcaaaaattgcaaaagtttataaaggtttacagtagaatgtctttctcttatgtttatccaccagcaacagtgtgccttccccataaccaactgatattaccagtttctaatgtagtcttccaaagatattttatgcatgtataagcaactccatttgtgtatttttttttttgccattttcttatacaaatggtaatttgtagtcttctgcatcttatttcacttaatgtattttggagatcgtaccacatcaatacataaaaaaaacttctacattcttgttttggctccatagcattccattgttgaatgccctgttcctcatttagccatctcctgttattagacagttgttattacagacaatactgtgtttaaaaaacttgtacatacatcattttgcatgagtgggagatgttatatctttatatctttagtatatattcctagtggtagaattgctgggacaaaaggactatgcattcataagacagatttttgccaagcgttccttcaaaggactttaccaatttatattttcactatcatcttatggaacttttaatgacgaggagatggcagtagtttccaaatatattagaccaggccctaatttattaatctagtgatgactgtcttcatgagggcttggcaggagtcaaagcaaaaatcagaggacatctcccatagatcaggaacaacataaggatgtcttttcttgcaatctgtgttaaacattgtactgctagacaagaaaatgaaatcaaaaggatccacactggaaaagaagaagtaagatgatctctgtttgtagataacacaaacagatctctgtttgtagatagaaaattctaaggaacccactaagaaaactattagcacttacaagcaagttcagcaagggtgcaggatacaagattaacatacaaaaatcaattgtatttttatacactagctatgatcaatttgtaaataaaatatggtgaaataatttcctttataatatcctcaaaaagaataaaataccttggaataaatttaacgaaagaaatgcaaatcttatactctgaaagctacactgttgaaagattattaaagaagatctaaataaatgcaaaggcgtaccatgttcatgagtcaaaagacttaatattgttaagatggcagtagtttccaaattgatctgaagattaaatgcaattctcatgagaatttcagctgacttctttgcagaaattgataggctaatcctgaaattcataagataatttaaaggcctcagaatagccaaaacaaccttggaaaagaatgaactcggaggaatcacacttcctgatttcaaaacttactgaaagctacagtaatcaagacagcgtgatgctggattaaggatagacacagacaaatggaatagaatcgaaagtccataaataaatccttgcatttacaatcagttgatttttgacaagagtgccaagacaattcagggggaaaggagtagtcttttcaacaaatgttgcttggactgctggatatacatatgtaaaagaatgaattttgacccttacctcccaccatatacaaaaactacaattaaccaaatacttaaatataagagctaaacatgtaatactcttagaagaaaacataggtgtaagttgtcataaccttggatttgtcaacgatttcttagatataatagcaaaaccgtaagcacctatgaaaagataggtaagttagatttcatcaaagttaaaaatttttctgtggcaaagacacaatcaggaaagtgaaaaggcaattgacagaatgggagaaaatatttataaattatgtatctgataaaggacctgtatgtagaccatgtaaagaacctttcatttaatactgaaaagataactaaaaaaatgagtgaaggatttgaacagacattttaccaaagaagatctataaatggccaataaatacgtaaaattatgttcagcatcactgattatcagggaaatgcaaatcaaaaccccagtgagatctacttcacatctaggatgacaattgtaacaaaaacagaaaataacaagtgtaggtgaggatgtggagaaattggaaccctttacattgctgatgggaacgtaacatggtgtagctgctttgagaaacaggttggcaggttcaggaaaggttaaatatagagttactgttggacctagcaatttcactcataggtatatactcaagagaattaaaaacgtatgctcactcaaaaaacttgtacatgaatgtacttagcagcattatttataatagccaaaaagtggaaacaatacatatctgatgaatgaataaataaaaggtggcacaggtattctatacaatggaatattttcagcaataggaaggaagaattactgatacaagctacaacacagatgaactttgaaaatattttgcaaagtgaaaggagccagtcacaaaagtgcacatattgtataatttcattatatgaaatatctagaataggcaaatctgtagagacagaaagtaggctagtagttgccaggggctagagggaagggtagtgttgaaggaaaagagggagtgactgataatgggtatggtgttttttatgtgggtgataaaaatgttctaaaatggattgtgatgatggttgcacagctctgaatattctaaaagccattgaattgtacaattaaaataggtgaaatacatgttaaataagtgaataggtaaattatatctcaataaaggtattttaataagagtcagagtgcaaaggtaatgtcatggaccaactctaaaattaacaattcaaactcttcagtagcaaacattctaaaatctctagaaaagtatcccatactcacatctcatactcacatgtgtccactgagactcgtgggtagttcttgagatgggaaccacttctgagtcattttttttttcaggttttaggatgagcaactttggaacggaggaggcctttagaagaaagaaggaagttttagatcatgcctgcaattcagccttgcagagttgtttgcctgtttgaattttctcttatctctatggaacattgactacttcctcagaagcttatacactgttagagtactgggtaaaatttcatttgaaactacgggaactcctttgctgacctattgtggctgttcctaatgtttcttggcttcatgctgcttaggaccccatgggaaatcttggcagaacaccctgttatacatctatactgagtgcctctcacagcttcccttcacatcagatttttctgtttgtcacccgcttttgccccttttccttcttgtcttaaagagagacatccttcactcctgtctctgaggctacctgtctcctgtgttcttgatcccacgttgtcccttgggacactgcttcatcatttctgtgtacctctctggcctcttttgaccctttccctcatgggctttttttcttggctcgacagttgctcaaatttcccatcattttttaagaaagtagtaacaaatgtacaaaaagtcccaagcatcaaaactttccttagatgtttatgtctttctcaatagactacaatctttttattttctcacagtcaacttttttttgaaaagtctgtgtattttcctatttccatttatgtaaactttgaatgaagagaccagagttacaaagcaaagagccttgtgctaaaattaagtctagaacatatcatacttggaagcattctgcatgtgaaggagaagtggggtggccacaaggaggagaaggcattttctaaattgtttttccaagttgtggtacttgaagcccaacgactgtaattagactcatattctggctacagggctggatgcagtgagagtgttatttggtgtcccactttgtttgtttatattttaggcattggagaatggaccagtttcttgggggagaaagtaccattcttgagattaagagatggaagttctccctgtacagaaaatgccctgagagagtcatcaagatgtatttggttaagtgtgttcatttcactttgaatgttaaggtttctggcatgaagccagatttcagaatctcagtgatcttgagtgtttagtctagtctgagactgatgagtgttctaccaggaagtgagaagcatcaggttgagaatatcattgggataaggtgagcagggaatccattaagggactaagagccctttactttgatattgagaggggacattgccacacatgatacaaacagcactgatcttgctcagcatctgcaaataaggatcgcagacacaacttttcaaatagtcacttcagccttacccttctgctaaagtaatttatgtcaagtagggaataggcttttcaatgtcatccaaaccccctgcttagggaaggggcattcgtttgtaaacacactacagagctattgaagaatacaaaacttggtgaccttatctgtaaagctggtgtggtacccttctcaaacaccagagcaccgtttagtgagaaaatcagctagtcgattgcccaaacgttttccattttagcatcagaggaaccaaagtccaggaaggtgaaaatatgttgggcaaaggtcgtggcaatttagttttttgattgagtctagatctccctggatagacctgggtcgtgtcaaaacagtttctggtaaacagttttataacctgcctctgtgatccagaagagcctggacatgtgagtagaaagcctgtacagtggatttaatcctggactttttcctttggataccagaatttatatatagccctgacatagttcagcaataatccttacacgagctagtggaaacagacttgtgatgaagagtaatttcagctgaaggactaaatacaattatatgggaaagccgactgcttacatctgtacaagctctgtgtatgtggacaaggtcctcgaaacagaggaagtaataccccatgcagctgtagtgatcattaaattaagcaattcgtgtgaaatgctgagaactgtgccttgcatgtaacacatacgcaataaattctaggtgctattattattctcatgagcaaccacttgttaataagaaggtacctgccagaaacggcagtgtagctgatgggtaacttacagcgttcatttatcccagacatatttattgagcatcacagcctatattgatttgctcctttaatgccaccaaggtagatattggttttcccattttaagggtgaggcttacattaataacatcccaagttttcactgctaatgacgggcttggtcctttcccactaggtctctttttcacagggtcttgttgtgttgttttccaatttactacatataactttgttggagactttaaaatcatctgactttgtatagatatgagtgggtacttccttcagtctttaattctgcttcccaataatgaagacttgtgagaatttccatcaataatatttacttaaaatcaatccaataaaaacctacaacttaaagaaaatcttatgaaattactgtatgcaggaaatattacaaattacctcctcatatttttgattagccattaaaatcagtttgggaattaaagagcttctgtatagcaaaagaaactaacactagagtaaacagacaacctacagaatgggaggaaatattctcaaacaatgcatccaacaaaggtttaatatctaaaatctataagaaacttaattcaacaagcaaaaaacaaataacctcattaaaaagtgggcaaaagacatgaacagacacttctcaaaagaagacatacaaaaaaatgctccacatcactaatcatcagagaaatgcaaatcaataccacaatgagacagtgagaatggttattattaaaaagtcaaaaaatgagatgctggtgaggctgtagagaagaagaaatgcttatacattattagtgggaacgtaaattagttcagccactctggagagcagtttgagaatgtccccaagaacttaaaacagagctaccatttgacctagcaatcccattgctgggtatatatccaaaagaaaaaaattgttctaccaaaaagacacatgcccacatatgttccttgcagcactattcacagtagtaaagacatggactcaacctaaatgcccatcagtaatagactggataaagaaaatgtggtacatatacaccgtgaaatactattcagctatgaaaaagaacaaaagcatgttctttgcaggaacatggaggcaagcaagtcagtgcaggaacagaaaagcgagtactgcatgctctcacttagaagtgggagctaaacacttatgtccacttcggtactcgtggacataaagatggcaacaatagaccctggagactagtagaagcttgaaggagggaggggagaaagggttgcataactaactgttggatactgtattcactacctgggtgatgagatcagtccaaacctcagcatcataaaatatacccatgtaacaaacctgcacatgtacctcctgaatctaaaataaaaactgcagttatagaaataaaataaggctgagtgtggtggctcatgcctgtaatcccagcactttgggaggctgaggtgggtggatcacctgaggtcaggagttcgagaccagcctgaccaatatggtgaaaccccgtctctagtaaaaatacaaaattagccaggtatggtggtgcatgcctgtaatcccagctactcaggaggctgaggcaggagaatcacttgaacctgggagatggaggttgcagtgagctgagattgcgccattgcactccggcctgggcaacaagagtgaaactctgtctcaaaaaaaaaaaaaaaaaaaggaaaaaaggaaaaataaaataagtttgggaacattgcataggttacagtgtatatgagactacatggaacatatttactctaatacgtttcacccacatttctgtgatcacataggtggaacattgttctggtacaatagagaatttatatactttttcttgtgctcagtcttcgcaattaactgatttagatatttcaaggtgactgcctggaacaatttccagacttattacctaagactacagaactccacttcttttgacaccctgagttatggcattgcctgaagcaatagttgttaattacggtaatgattatttcttcaggagttaaaaagttagagtttaaatctttctataggactgtggaattttcactttaagggttacgtgaggatctgaactagttaatattgaaatgagtacacttgcatgaaccaaactacagtactttgaaaataagttgttagtttttgtagattagcgttctctttttagaaaatctcagatttaaattttttgattttcttgaagcaatttctttgtctttgctttttaattgggcatcacgaacccttagccagaagtgtcaccagtgggaaatgcgctaagccaggaaagtatgtagccgaacaaaaggcaaaggctactgtgttcttttgctaggctatggtttgcaaaacatgactctcacaaacgtccagcttctctggaaagaaaggtaactagacattgcagaaacagccatggggcaaaggattaaactgaggttttccaggttgcaggatttgagttacagggtaaagaatcttgccatatattttctattattttggccgtggtttctttaccctcttgtttcttgttggcagggaacatgaagagtttcagaattcatgaggaatttcaggcctggggaaagagctgcatttcttccttatgctttttcctccaagatggcgttgagttagaaagacctggaagggggtcagcctctcctccttccttgctccactgaagagcaggaggggactcctctgctaatatccattctttatagtttgcagttaatttctcaactttggttgttttgccttcttatattgtcaaatggagactctgtagatgtttcttgagtccagggattagccagttctttgtttctgtcgccactagcaatgcaggatcacaagatgcttctgaaggccaaatgctacaggagttaagaaggcaagagagtgaaagtggggtagggaaaggaagagaagagcatgggaaaagcaagaaatacatttgttagagagtgtggcagtgtgggtgtggcaggaaggatgctgcattatttcaataaatgttggaagaaaatttgacaaaattcattgtccatttctgataacagcatattatttaataattttctgtagctgctgtaacaaattaccacaaacttggtggtttaaaacccctgaattttttttttttaagttttgttttacgttcaggggtacatgtgcaggtttgttatataggtagacttgtgtcatggggatttgttgtacagattatttcattacccaagtattaagcctagtacccattagttatttttcctgatcctctccctccccctccttccaccctctgataggccccagtgtgtgttgttccctcatgtgtccgtgtgttctcatcatttagttctcatttatataagtgagaacatgagataatctggttttctctttctgtattagtttgctaaagataatatcctccagctccacccatattcctgcaaaggatgtgatctcgttctttttttatggctgcatagtacttcgtggtgtatatgtaccacattgtcttttttccttccttccttccttccttcctttcttccttccctccttccttcttttttttgacggagtctcactctatcgcccaggctggagtgcaatggcaccatcttggctcactgcaacctctgtctccagggttcaagcaattctcctgcctcagcctcctgagtagctgggattacaggcacgtgccaccacgcccggctaatttttgtatttttagtagagacgtggtttcaccatgttggccaggctggtcttgaactcctgacctcaactattctgcccgccttggcttcccaaagtgctgggattacaggtgtgagccactgtgcccggcccacattttcttatccagtctatcattgatgggcatttggattgattccacgtctctgctattgtgaatagtgctgcagtgaacatatatgtgtatgtgtctttatggtagaatgatttctattcctctggatatagacccagtaatggcattgctgggtcaaatggtagttctgtttttagctctttgaggaatagccacactgctttccacaatagttgaactgagttacactcccaccaacaatgtataagcattcctttttctctgcaacctcgctggcatctgttattattattattattattattattattattcacttttgaataatagactttcagactggtctgagatgttatttcaccgtggttttgatttgattcggactggtctgagatgttatttcaccgtggttttgatttgattcggactggtctgagatgttatttcactgtggttttaatgatcagtgatgagctttttttcacatgcttgttagccacacgtatatcttcttttgaaaagtgtctgtttgtgtcctttgcccactttttaatggggctgtttgcttttttcttgtaaatgtgtttaagttccttatagatgctggatatgagacctctgtcagatgcatagtttgcaaaaattttttcccgttctgtaggttgtctgtttattcataatttctttagctgtgcagatgctctttagtttaattagatcctgtttgtcaatttttgcttttattgcagttgcttttggcatcttcattatgaaatctttgcccattcctatggctgagtggtagtgcctaggttgtcttccagggtttttatagttttgggttttacatttaaatctttaatccctctggagttggttttcgtatatggtataaggaagggatccagtttcaaccttctgcatatagctagctagttattccggcaccttttattggatagggagtcctttccccagtgtttgtttttgtccactttgtcgaagatcagatggttgtaggtgtgcagccttatttctgggctctgtattctgtcccgttaaaacaccagaaattttttctctgacatctggaggccagaagtctacagtgaaggtattggcatgtcaggctccctccagaggctctgggagaggatccatgcctgtggtggctgctggcctttggcattccttacattgcagctgcatcaccaaagtctctgactcagccttcgcctctccttctcctctctgggtgtgtctactctccctctgcccctctgtgtaaggacacttctgattgcatttaagtcccacctggataatttaggctcatcttctcatctcaaaagccttaatttaatcacatctgcaaaaaattatcatgataacattcataggttgcatggattaggatatgggcatgaacttgggaaccatcctcagcctggcccactcagtaaaatgaaaagagtgatatacctcctcaacatgagaaaaatcattcagttggtctattcagctgaatccaaagccagcatcatttttttttaattgtgaaaagcaagaaagaattctcttaaagtgaggatcaaatgaagatgtctacatgaatatttcatatatgttttggacatgtcagccaatgaacttatacaaaagaataagaggcttaaatattaaaaagttgtgtacaattcatttggaaacaagtagacagattaataggtgatattggaagaactatctagccattggggaagcggaaagaatgtttttaccttatgaaaatgcagagaacataaaagaatgtaaaaatttaaaattttatataaccaaaaaggaaaaaaaacagtgtatgtgtttgtgtgtgtgtgtgtgtgtgtgtgttgcaacactaactacaaaaggggcaatgccttcttttacaaagaaaacaataataataacctgttataaaaatgagcagatgacttgaacagggagttcacagaaaaatgaatacagatgacagtggatatataaaaaatactcagctgcagctgggcgtggtgtctcacgcctgtaatcccagcactttgggaggctgaggcaggcagatcacctgaggtcaggagtttgagatcagcctggccagcatggcgaaaccccgtctctactaaaaatacaaaaataagctgggcatggtggtgtacgtctatagtcccagctacttgggaggctgagaaaggagaatttcttgaacccgggaggcagaggttgcaatgagctgagatcgtgccattgcagtccagcctgggggacagagtgaaactccatctcaagaaaaaagaaaaaaaaaatatatatgtatactcagcttcattaaatatttttaaaatgtgattcaaaacaatgagacaccccttgtacccttgtacccatcaaattgacagagatgaaaatgttaatttgctgagggattatttatatttattcatttttccttttttcattaagagtttaagttagcttgctaggttgcataaaattaagcaatttagcataaattaaaagtaagtgaggccacctgcaaagtagtcttgccaaacaatctgatcaagttgaatctgatcaatttctaaccaacagagggatgtgtgagtcaataataagggataagagcagcagaatccagtggaaaaaactacaggacacatggcctgcatttcttcaacaaaataattgcatgaagttgcaggaggagaggaaagggagaggcaaaaagaaatggagggaggtcaggtgcagtggctcacgcctgtaatcccagcatgttgggaggccaaggcgggcagatcacctgaggccgagagtttgtgaccagcctggccaacacggtaaaacctcatctctactaaaaatacaaaaattagctgggcatggtggcacatgcctgtaatctcagctacttgggaggctggggcatgaaaatcgcttgtacccaggaggcagaggttgctgtgagccaaggtcgtgccactgcactccagcctgggtgacaaagtgagactctgtctttaaaaaaaaaaagaaaggaaaaaacaaaatgaatggagagcccctggattaaaagggaaataagaccctgtactgatagcattctaggggaggagttgcagatgaagaacgttcctttgtttctttattacccccttagtcttcaagcagctggttgaattaaagttactatcttggagtttcctttggttaaaagggaggtgatcagagtgctattaaaattgtgggccgggcgtggtggctcatgcctgtaatcccagcactttgggaggctggggcgggtggatcacctgaggtcaggaattcgagaccagcctggccaacatggcgaaaccctgtttctactaaaaatacaaaattagccgggcatggtggcgcacttctgtaatcccagctactcgggaggctgagataggagcatcgcttgaacctgggaggtggaggttgccgtgagccgagatcgcgacattgcactccagcctgggcaacaagagcgaaactctgtctagaaaaaaaaccaaaaaccaaaaaacaaaacaaaacaaaaacccaaaattgtggtcttggaccagaggaaaaaaagaatccattacttccacataaaaaaaaaaaaaaaacaacaaattcacccctcttattcgctatgccactcttttaactattaaaacagaattttctgtgattctgttactatttaagaacatctttatatattggtaaatttcgttttattttttcttttatttattttttttttgagctggagtctcgctcttgtcgcccaagctggagtgcagtggcgagacttcggctcactgcctccaccttccaggttcaagtgattcccctgcctcagcctcccaagtagctgggactacaggcgcccaccaacacgcccagctaattgttgtatttttaatagagacagggtttcaccatgttggccagggtggtctcaaactccagacctcaggtgatccactcgcctcagcctcccaaagtgctggaattacaggcttgagctactgcgcctggctattttggtaaatttcaaacatattcaaaagtggactgtattataactgccaggtatctagcactcagctttgacaatgaccagctcatggccaatcctattttatctgtatctctatcccccactctgcctttttttttgaagcaaattctagaataatatcatttcactcgtaaacatttcagtattatctctaaaaaaaaaatacttattttttaaaacctaaccaaaacccagtgtgtattttgaaaagctcgagcacgccactaaatttctttgcaacccattgccattttttattttaaagtgatgtttttaacacccttatgactacatttccttgcgatcaatgctaatgagtgaagcagcccataaatgaggaaggagatgaaccgagacagtaggagttccctactgcctgcctcctgccttttccctgggcctagaacataactcagggcattggctgtgatttgcttttaggttcttttaagaacatcttagtcaacaccaaattgttaacatgacataaaaggtctactaggacttttttttttttagctttaatcacatgaagctgtaataaaacccatttgagcacttttattctcttaaaatggggccatttcccaattagcggatggacaggctggctcattcttctttgacaggaacgtaattctttgtgtccttcaccgattcttcgaaatgttcttagcttggctggctgccttcccttcttttttttttttttttgagagggagtcttgctctgtctcccaggctggagtgcagtggtgcgatctcggctcactgcaacctctgcctcccgggttccagcgattctcccgcctcagcctccagagtagctgggattacaagcgtgtgccccacacccggctaattttttgtacttttagtagagatggggttccagcgattctcccgcctcagcctccggagtagctgggattacaggcgtgtgccccacgcccggctaattttttgtatttttagtagagatggggtttcaccacgttggccaggctggtctcgaactcctgacctaaagtgatccgcccaccttggcctcccaaagtgctgggattacaggcataaggcaccgcacctggccaccttctttcattcttcttgtttccctgtctgtctcaggcaactttctacctctctgtttgtcattcccagatctactcatttcctcctgtccctctcttaagctccatttgcctgcttgaattctgccatgcgtcccgtccctgcagcatcttatacttaatacatctgacttggaactcatgatctgccctttccccactggccacccccactgacctgactttcctctttcacttaacttcatttgggggtggaaaagccagatgacgagcatcatttttactaccactactattactagtagcaatacttctactattactattactacttccagtactactactatgcttctgttcctttgttcctcttatgcagtaagtgaccagagcctatagattttgcctctgcaaaattcaagcagcttatttgtgagccagattgctgtggtctctacctcttatttttgggtctagtgcttaaactctgtacataggtaagaagacatgggccctgacttcaaagggcttgcatttttagtggaagacatggatgaacagatgggttcacttaatcagcataggaaggttcagggtactgtggcaacacagaggaaaggtatttattgcattggggactttcatggaagacttcctggagaaaaacatacttgagctgagtgtcgcagttgactggggaaaacaggtaataacaacattctgaggaaaataagagcaaagacctggaggcataaaacatcaaggcatgagagtatgtgggtttatgcatgagtgtgtgtgtagcacagtttcaaaacatcctgatattattagatcagttcatcttgttacatcttttttttttttctgaagcatggatgtggtatgatgttcctctactgaaaaacatacatgacttctctttttacatctgaaatttaaaatatatttgttacagtattttgatctctgactccaacttcctcctccaggtttctctctccaccacttttcagtttgtccagagtagaaaactcagaattctttgaatataccacagtgcttctccttacaaagatatttcatcctcattttactttgaatccccttattgtctctccaagtcttgattgtcaaaatcccacccatggtctttttaaactttgattttggaaatatttaaatatataaagaagacatacagtataacaaaccctcaggtacccttaaatcctaccaaaatcaaagggccacttcaaataccacttcgtatgtgagaccatttctcagtgttgcttgtcttgcttcttctctcctgctttcagggtgcaatgctgttattatggagttgggttttcatatctcctgatgcttcgatggcagaattgcatcttaataagttttgacccttgcaatgtgtaccctggggaatgattgacaatttcagctcaaagatagagataacacagtgaggagctagcttggaatttaattcttactaatcagaaagaactggtgggttgtgggggatgtgacaagagccttggaggaaagtgacgttggcaacataaagtgagaaatggtaaaacaagacaaacaaacaaacaaacaaacacaaaacaactttacatagacatgtggtagacaagggctacttaactgtggctgatttctcagacacttgtgaaacttaaaaaaatatatggatcctgaagcctcactctatcaacttagctggtaactactgtccccagtagctgagagacctggacaaaagggcatcagcaggggacccacctgcatgggtccttttggggcagtttcacccatagggataggattgcaagtgtggcttcagtgacacaactacaatgtgagattttaagactttttagcacttagagactctgtatggcacccagcacgcctggaagccacacacacacacacctggaagccacacacacacacacacacacacacacgtgcacgcagagagagagagaagggaccactgagccaatgtctttattgggtacagggcgttatccagtttcctgcggggagctttaattgctgggtttaaagcaagcaggcactagttctaggaggtcacagcgtgactgagaggtggtcaccttacgtttgtgggcaaatgtctgcatggtctgtttaaagggagtggcaggaaagtagggaggccagcctgctaggcaggagagatgtctctaagtttcatgtctggccgctgctttggagccactctggtggagtgtggtattagacaccgtgttaagagtgactgagccctgcttctgatatgagatagtttaacttaggtttaaaaatggatactgaggcaatgtaaaattataagcactcactacactcagtcccagaaatcctgagtctatagacctggagaagttcccatagtcagtgggcacaaagagaggtagattcaagattgatgagatgtttgaaaaatgtaattctagcgtaaataacacgaaagagggagaatggagcacggaatttgaagaaataagatgccatccagggaacattctgcttaactcatattttaaaaatgtaagcgtaaacatggaagggacaaaaggaagtatttattgagcacctatattatgctacaccctgctaggcttcttcacacacactgtgtcaatcgagtctcttaatgacctgcggagattgtacatcatctccagtttgcaggtgtggaaactcagtttaagataagaaactttctcaacattacgtcactaagtgggacagctgggatttgaaatgattcttattgatgcagaggtttgtgcaatttccattccattcttggttgttcattttgtttgtttgttttttgaagagctctgtacaaatgttcaaaacagttgagaaaagaataacaaacattcagtcaacaaatatttatgatgtgcaggtgctgggcaaaatcattggccatcatggaacttatattctagtggagaaaggtagataaacaagtaataaataaatgcagaagtaaataaataaatacaaaaataaaataattctagattgtgagaaaaggtttgcgggaaatgagtggaagatggtcatggagatctattgtagagagagtggacatttttcaactaaaatatcaaagtttcagggaagctgctttgagctcatattgtgttgcaggctgagtgtaaggtgccagaatgtgaaagcaggaatgtgtggatagtaatccttagattgtgttcaggaagctctgggaaggttctatgagggaggttttgaatttggaaggttgagttcttgtctgcaagacagctagagccctccaggtagaaggaacagtatgagcaaaggtaaggtcttaggagattcattctgactctgaaatcaaactgactgcaggttttaaaatgagcttttcagctgggcacagtggctcacacctgtaatcccagtaacagcactttgggaggctaaggcgggcggataacctgaggtcagaagtttgagattagcctggtcaacatggcgaaaccccatctctactaaaaatacaaaaattaggcgggtggggtggcacgtgcctgtattcccagtcgcagctactcgggaggctgagggccatgagaattgcttgaacgtgggaagcagaggtttcggtgagcctagataggaccactgcactccagcctgggtgacaaagtgagactctgtctcaaaaaaaaaaaaaaaaaaaaaggccgggcatggtggctcacgcctataatcccagcactttgggaggctgaggcaggtggatcacgaggtcaggagttcaagaccagcctgaccaacatggtgaaaccccatctgtactaaaaaatacaacaattagttgggcgtgatggcgggcacctgtaatcccagctactcaggaggctgaggcaggagaatcacacaaagccgggaggcggaggttgcagtgagctgacattgtgccactgtactccaggctgggtgacagagcaagattccatctcaaaaaaaaaaagaaaaaaaaaaagaggttttcagcttttcttctctaaactttctgtaattccagagagatttgtcttcagtgtttggaatctcagtggtatataagagccagtggttttggaagattggaggatggcagagtccctgttcacttttacattgctgttgcaaagccagctttcttcctgcatgcctcttcccctgccctgcttcgttcgttgctttgcatatgatgattgcaatttaataacactgaatgatacttcactgctggttttattgccaactacccttggaacgtaagcctagatgcaagtagtaaggagagggcagccaaggcctctagattgccagttacttggctggaaatcccattcatattgggaaacagatttttaaaataaatttggcactggaaacactgccatccttttgtgaagctgtgtcaataatcataaactctcatagtcgtgcccccaaccctcggccaagctaacaaatatttaggcatcagcatatcttcacgatgccaccttctgttgaccgcgtgggcttctcatgctgtttgggttggcagtggaacataatcttctgttttatgtaatgaggaacatcagaggagtgctttgtgcttaccctctcagagtgtgtgcaagacctctcgtggaccccatcattttcggtgcagtcaaagctagcgaacatttctgtggcctggtaaatattttctaactattggcaaggctttttaaatttttttttccagtgccattttgctccaggccaggattataatgacccagctttgctttggtttcagatgaattttgcaaatatatgtgtgtggtgggattacactattttcagagaacacagtcatgcgggtaacagggtctgatgcaatatagtgctgcatatgcccaatcaggccgacgaggcttaccctttgcagactgtgccaataagcagtcgaggcttgttgcgatctgcagaaatctacagaattctctgtttccgagaaggcttgttgctagcatatgacatcatagaaagcctttttttttttctgacattttttctgctttgctttagaatatcaaaggcaaagactgttgaacatagttggccacttagctttattattcatagtgctccctcccatgtttttttttttttttttttttaacagtgttcaatgttagcgtcaggtgttggctgccttcctgggggaacagattgctgtgaagtaaacacagctggaaactgaccacatattgtttttctttcttttaagaaatcaaagaggcatttatagaaaagctgcagaacatggtactgtccagatttatagatttattcctccaagtctggttaatgattaatgtcacgcctgggtgtccacatagacccacttcccttctcccttcctgaagctgcaatttcctcggaacaatgagcttgcagaggtttgctgcaatccgaacttgaggagggggtggagtctgttcagttctgtttctccttgccgaagtgtggtctttggagctaagtgaagaatgacttctgttaggttttcctctgctggtcttccttgcagcctcgaaaacctcaccagagtcgcctctgctggtctcttactgtgctgctctgtcagagatgggcaagtaagcgaactgcagagtgttgctgtgtgtgcttgtgatttgtattttatttgatgtaaacgtgaaggcagagtattttctaacactgtaattcaactaggttttgtgtctcctggatctatttttttttcttgttgttctgaggagctgatatacttggaaatattaggtttaagatatgcagatgtccaacttatatacatagtcaagggtttagagtctggagacaggaggctggcaatttcaactaggaggcagtaaattcagggtaagaatgatgttgatgtggggggctgtgggggtggctgggtgtaacagtgatctggggagagaatcaaaggccttctcctcccacttggaagactttactattattttggtcttttattcctttggtctctgtgctaaaaactttctctcttttttactgtttctttgtatagatgttttggtgatttaagttatggtgtaataattaattgctgttaagaattgctactaattacttgctatattaaagttttccaaaggggttttctcaataaatagctatttctctttacatctatcttgtaagaactgagttagaggtaaagaagagaaagatgtaggaatttaagagtaacttctgcttttggtttgcttaaatgacaactggagaccagttttcataggcaaaatatatgttactttagtttttgttttcgttgagagaactgtagggtcgccttttgggattacctgaattatctgtcacctgcactggaatttgtatgtagttatctgtatagttatctaaacaagttgaatccgtcattcattcctcactgaagaatctcatcgaaagtaacattccctgtctgtttggctgaggtgcatggatgggaattgttggaattaggccatatatctatttggattctcataactgggtccagcacctagcatagttcctggtacataggaaagctctatgcgatgtcaataactgactaatttagtaacatccttaacagctgtttgagttccaagagcaggaaagtgaatggtgagttttgaaccttataaaatacataagtaaacccaaatgaggagagaattgagaaagcctcttattctgaaggtggtcctaaaaggctttctctaggctgattactgtgaagcatattttttcctggctatatacaacttggcagaattgatctgattttggattctgaaggaattgaaaaatttcattatacattatagtgggctataatgatgtggccagttctcttcattaattttttaaatgactttaaaaaaaatgagacagtactgattgtttccctaaatgaatctaattaacagctacttaaggtatcttaatgttttttcatatatgttatctgctttgattctcatatcagtccagtgaggtgagtatggttgttacttcctcattttacaattgagaaaactgagagtcagatgaaaagtgattctagaagttgcgtgatgcgtggaagaaccagatgtcagctgggtattttaaaactcaaaatcccgggtacgtctcacctgccccctctccagtcatctctaaacgtcttctattgcaggatagtagaaagaactcccacctgggtgtcaggagacctggattctgattctgactgggtcattgctgacctctgtgatgtggagcaagtcactgaagtctttggatgttatttttctgcaaggaggttattttaattggtttcttaagtttctttgcagcttcaggatctatccagggccatatccagggcttgtgttatctctgagtgctcatctgcaatgtagagaagaggtgggaaaggaggtaggattctttttttttctttttttttttgagacagagtcttgcactgtcgcccaggctggagtgcagtggtgtgatctcagctcactgcaagctccgcctcccaggttcacgccattctcctgcctcagcctcccctgtagctgggactacaggtgcctgccaccatgcccggctaatttattgtatttttagtagagacaggatttcaccgtgtcggccaggatggtctccatctcctgacctcgtgattcgcccgtctcggcctcccaaagtgctgggactacaggcatgagccaccgcgcctgggcagaaggtagcattctttccagccattctatgcagctctcccttggtttcccctgccaagtgcaaagagacacaggatctccatgcatgaggaaaaccccaggcccttgtttgctctgttctgcttcctgagctggcatttctcagtctgttcttttttactcatcaacaaaagtattcgagccaaattctcttgtaatttcagcccaggtgtgatcaacatcaagttacctttccatttggcccaagaagaagttataacttccttgcataagctcatctgttatcttaatcctttctggaacagggaaaatgtaaataagtattactctatccctctcttaagtttttcaaattacagcaggtggttgggaaaaggggagggcagaacagtggaaaagcattttttattctacttccattgctaactttgtagtagttaacagatcgatttagaaaatagtgggttactaagataagggtgaccaccctttactaacactaaaaagaaaaaaaaaaagctataaccaagtgtctgccatcaccattatagtgtaaaagaaaaaaaaaacaaaaacaaaaaacaaggccaggcatggtggctcatgcctgtaatcccagcactttgggagaccaaggtcagcggatcacctgaggtcaggagttcgagaccagcctggccaacagggagaaacccccatctctactaaaaatataaaaattagccgggcatggtggtgcatgcctgtaatcccagctcctcaggaggctgaggtaggagaatcgcttgaatccaggaggcagaagttgcagtgggctgagattgtgccactgtactccagcctgggtgacagagtgagactctgtctcaaaaaaaaaaaaaaaaaaaaagttgcaatgacaaattctcagtggggagaaagggcagatcttcctaggaaaagagagttggcattctcatcctgatgtttgccccctggactaatgaaaaacctcattcatgaccacagtctgtatttgagaagctctgtcctacctggtgcttgggttcttaacactcacagacttcctgggtaggaagtggcgctttgaatggagacatgagagctgcctgtgcaggtcagctctttcctttgccgcagtctctttctctgctatcttgctatgatttagtccttaactttttccttttgtctttccccataggcaagaagcgaaaccctggccttaaaattccaaaagaagcatttgaacaacctcagaccagttccacgtaagttgacaagaccatcatctgaatccaaatccttgtgctttcagattcctcctgggggtttatttttggactgctgagcaatgccttgactttagaagagccctttaagggggaagccatttgctcactgttctgagacctgaaataatcatcttatcagtcagttacgttgaatgggtagttttgaactcagtgtcttaagttattggttgagtaggaagtgaatgtcacatatatttggcagatggggctctatgtaaggccagaaaggcccctggatgtgaacttccttgccttttccctgtagattggagcaaacaggcaaatccctgtgaaagccactactataaaacttgggttgagatggaaagatggtatttggtgaggacccacatcctgacacttaaattctgtcccatataaacagaaggaagaatgaggtaaaggaacacttttttattagctgaggttttggcccaaatccctaagtcagctcaagtcctagtgaaggacatcgtgtaaatgacatcctctctgtgaggatgtctccttcttgtttttttttttttatttttattttttatctgtctctgtgtggtgggaacggtacttcctgtccagctggaggtacaaccacctaccaaggcatctgcatgagaggaatggaaattccaaggaaactcacaatagaggtgttagagagacagggcaagggcaaagagagggcatcctaatggaaaagtgagttggtaaggcttttgttcatgtctacaaaagtgcctccctttgtgatgggttttgatcttagctatgatctgctatcaggaagtgcacccctagtgttggaatgtgttcttaaatgggatcatgtctgctgtaagactttgttaaagccactggtccttgcattgcgtgaagcagtatacagacactttccactggagaatttttaaggacaaagtagagttgagggctactcttcagggttctggactgtagctcaagagtctaaactcaagatagaatgttcctttcattagaatctgcaggaggaagatccgtcttcccatacttgctgtcaagattgttttctttttctcttttttttttctttttttttcggtctctctgagcaatttctttttctcgtagacctgtgaactgtgtaattactattgtttcctctctgactggtttctcaagagcttacagtcaaatatgtggcctacttttactacctgtataggaatttatgggatatacttttaaaactttttattttgaaataattgtagattaacaggaggttgcaaagaaacgtacagggaagtcccatagatccctttccccaggccatgccaaactcccccgccatcccaagttaacatcttacacaactataatacattatcaagatcaagaatgtggcagtagtgcaaatcatagaacttaattttgccagctatgcaagtattcctttgtgtgtgtgtgtgtgtgtgtgtgcacgtgtagctctataaagtttatcacattgtgtaagtcttgcataagtactattataatcaagatacttcactacagcaacattacaagactcttttatgctcccctcttataatcaaacccacctcttctccccatctccgtccttaatccccagcaaccgctaatctgttctcctttgccattttgttatttcatgattgttatataaacaaaatcatgcatctctttttgagatttttttttgttcaatgtaattttattgaggttcatgtaaataattgcatgtattgatagtttgttccattttattgctaagtacccatccatggtatggttataccacagttggttcaacaccttagcctttgaaggagatatgggtagttttccatttttggctattatgaataaagctgttatgagcatttatgcataagttcctgcatgagaataggtcttcatttctctggggtgtaagcccaatagtgcaattgctgggttatatggtaagcccatctttagttttgaaagaactgctgaactattggccagagtaattgtaccattttatgttctcagcaataatgtccgaataatctagtttttctggatctctgccagcaattggtattatcagtgtttttcattttagctattctgatgtgtagtgatatatatgtagttttttttttttttttttttttttttttgagacggagtttcgctcttgttgcccaggctgcagtgcaatggcgtgatctcggctcactgcaacctctgccccctggtttcaggtgattctcctgcctcagcttccccagtagctgggattataggcgcctgccaccatgcccagctgattttttttttttctttttttggtagagacggggtttcaccatattggccaggctggtctgctggtctcgaactcctgatcttagatgatccacctgccttggcctcccaaagtgctgggattataggcgtgagccactgtgcccagcctatatgtagttttaatttacaatttctctagtggctaataatgtagaatatgtttttaggtgtttattttccatctatatatttttggtgaaatgtctgtgcatatcttttgcccattgtctaattagatactttttattgtttacttttgagagttatttgtatattctggacacgaggactttgtccgatatatatgtgatatgaaaatatttttcccagtttgtaatttgtctttttatgcttttagcagggtctttcacagagcaaaagtttgttcaacttatcaattattacttttacagatcatgcttttgataataagtctaagaaccctttgcctagtcctagatctgtctagaagttttgtagttttgcattttgcatttaagcccatggtccattttgagttaatttttgttcaaggtatgagtttaggttgagctttatttttttggccagtgggttaccaattattctagcaccatttgttgaaaaggctatccctcctccattgaattgcttctgctcctttgtcaataccaattgggcatatttgtttgaagttatttccgcattgtttattctgttccactgatttatttgtctctccctctgccagtatgacattgtcttgattaccacagctgtagagtaagtcataacagggaaacatgattcctctcactctgttctctttcagaactatgttgactattctaaaggcctttctcttttcatataagttttagaataagcttatctatgtccacagagaaacttactgagattttagtaggaattgtgtttaagctatagatcaatttagggcaaattgacatttttactacattggttcttccaatctgcaaacatggtatatttcttcaactttaaaaattttatttctttcatcagcatttttataatacaattcctctatattagattttgttaaaatttatacctaagttttttttggagcaaattttaagtggaatttgatttgtgaacttggttttcacttgttcattgtcagtatatagaaatgcaatagattttttctgtattgatcttgaattctgtggattctgcaattgatcttctattctgtgactttactaaaatcacttattagttctagaagcttgtcatcgaatcgttagggttttctatataaacagtcatggcatctgtaaatggagactgttttattttttcttttccaatctttactttgatttttactttcattttcttgccttattgaagtggcaagaatgtccagtcctaggttaataaagttcatgagagcaggcaaacttgctttgttcctcatcttagagggaaagcatttagtctttcactattaagtatgaagcgaactgtaggttttttgtagatgttacttatgaggttgaaaaggttcccaactatataaaacctctcagtatactgagaggttctttttgattgtttgtttttgtttttttgagacagggtctcactctgtcacccaggctggagtgcagaggtgtgatcatggctcactgcagtctcagcctcccctggctcaagtgatcctcccatctcagcctccaaagtaggtggaactacaggtacatgccaccacacgcggctaatttttttttgtgttttgtagagacggggttttgccatgttgcccaggctggtcttgaactcatgggctcaagcaatttgcctgccttggccctcccaaagtgctgggattacaggcgcgagccaacgtgccctgcctgagaacttttattatgaatgggtattgaatcttgttgaatgctttctctgcatcaattgatatgatcataagatttttcttctttgatctgtcgatatgtagattatgttgattcatttttatgtactcagctagctttgcataccccaaatgaatcccagttagttatggtatatatatttttgtgcattgttggattcgatttgctaaaattttgttgaggatttttgtttctaggcttttgggagatgttggtctgtggtggtttatttattatttctcttgtgctattattttctagttttagtattaaggtaataatggcttaataaaaatgaattggtaagtgttgcttctattttttggtagacattgtataatattggtgctaattatttggatgtttgctaaaattctccaatgaaagaaaatgagcctggattttttttttctgggactttttaatcacaatctcaatttctttagtagttataggactattcagattatctgtttcatcatggctgagttttggtagtatgtggttttgaggagttggtccatttcttccaagttgtcacatttatgagagtaaaattgttcatagtgtttcctgcctatcctttaaatggctgcacaatctgttgtgacatcctttttttttttccctgatactgataatttgtgtcttcttttgttaaatttgtcaattttgcttgaggtttatcaactttattgattttttttcttctgaagaaccagctttgttttattttcctattttcaattttattgctttctgcttttatttttgctatttcctttgggatttattcttacatcaacctgccaggagtcttacatcccttccccttacaatttttattctttaccttttatattagtttacattatagcataaattatatgttaattttataaattttatgaatttcggaaggctaccataaaccctttcttggtataaacaaggataaaagcagtttatattttccctcgtatggtattaataaggtatactgtgaatatacttatctgtttcactgtgtgaagcaaaaagtatcacttcattattgtagagtataccgctgtagctcaaagagtctcgttgttattactttaatgccaaggcttaaatttgtactcctaaagaagtagctcccacattttgtgtttttcttggcaatttttgaaggctggcttggtgatttcttcccattcataccctgcctccttctgctgcgcttcacaaaaataaataggccttgacaaagctccattctcccgagttcaacgtgtgtggcccctctgtttgagctctttctttgagctaccgatgccagtgtgagctgtcccttcccttgattgatagtgaccaattctaaatcagttcgatgctagttcatattatttcatttaaccaccacaagaaactcagaggcagtgtttgttactctcacttgacatgtgaacaaacagaacgatgcaacggtcaggtgcattgctccaagctgttgagcatagcttcatgggtaagagttcagggtctggagccagaacacttaggtttatatttgggatctaaacttcactagttgaatatcttaggcaaaatacctaactgcgctaagccttagtttccttttctaaaaatacaaaaaattagctgggcgtggtggcgggcacctgtaatcccagcttcttgggaggctgagacaggagaagcgcttgaacccaggagggagaggttgcaatgagccgagatcgtgccattgcactccagcctagatgacagagtgagactccatctcaaaaaacaaacaaacaaaactcaggaataacagtgatgttgctgtcatgaggattagatgtcataatccatatgagtgtctagtgtagtgcctggtgcattgcaattgctcaatgaaaggtaactccaagttagtattatcacacagcttctcggtggaagaactggcatataagctcaggaatctctgactctcaattatgtactcttagccacacatcagactggtagaggctgtgagcaaacagtttatggctagtgaaatgagaggtagtatcctttacagcatactgtgcatgagaagccataatggtgcagctctgggttctaatctcattgtctttctaagtgttttttttttgttttttttttttttttttgagacagagtctcactgtgttgcccaggctggagtgcagtggtatgatcttggctcaccacaacctccgcctcttgggtccaagcgattctcctgcctcagcctcccaagtagctgggactacaggcacccgccaccatgcccagctaagtttgtatttttagtagagacggggtttcactatgttggccaggctggtctcgaactcctgatgtcgtgatccacctgcctcagcctcccgaagtgttgggattacaggcgtgagccactgcgcccggcctgagtgttcttaaattatttagtcactttcaatattaattgttgaaagaggtattaatgaggtattataccttgatttcaattcataccctattctatttcaatagaggtaataacacctctgagagttgtaaaaattaaggaagctattttatgtaaatggtctcacgcagtctcttgcccaaataggtgcttaataaatatttctgaatcaatgaatagtgattgcgatagtaaccagtgaactgattcctcatgtaaaattataaatgaataattatcgtactaaaccgaagctggttgttcatataaaaaaatgaatactaggtgacctttggaagacctttggtcttccaggggaagaatttttgtaataagcttggttctttccccagaggactaaaatattgaaaaagtgacagagaacatccacccacagtataaacttcctgcagaatcgcaatgcccctggcaaactaatatgcccagccctggagagaacacagtgtcaactaatccaatctgatttgtcagtcttggccccatcatttgatatttttggcccacttgatgagcccaagggcctgcggcacaggcgaattgattattttcattagaggaggcctgggtattgggagcaagttccttgtattcagtctgcctcgatgggaatcgcaagagcaggtaaaaagctcttagcccagttttttatatttccttctcttcttcctctttctcctccttaaatcaaggctgagattcgggtgacttgagttttattttcagctccgttgatgaccgtatggcttcagaaaatcacccagcttttctgggtttcatttttctcaatctggaaaatggcaccagacccttctattaggttcaggggtaatgcaaagttagtatagggccaaggtcagcaaacttttttgtaaaaggccggatactaaatattttaggctacatgggccacagaggatgccgttgtttattttttgtttttttacaagcatttaaatttggaaaagtcattcttagctggaccacaggctgtaatttgctgagccctggtatatatataaaatataagaatattagacttggaagaactcatttttcgataacctcattggatggcaaaaaaacagttgcagccccaaataattagtgacctttctgttgcttcatatttttaaaaagtcaggatggtgggtgacgcctgtaactccagcactttgggaggccatggcaagcggatcacttgaggtcaggagtttgagaccagcctggccaacatggcaaaacactgtctctactacaactacaacgattagccaggtgtggtgcctgtaatcccagctacttgggaggctgaggcaggagaattgcttgaacccggtaaggcagaggttgcagtgagccgagatcgtgccactgcactccagcctgggcgacagggtgagactctgtcttaaaaaaaaaaaaaaaaatcagggtgttgaataattgcaaaggatttttgttgtttatattagtcacatgtttcaagtcatatttgcctttatttcaaagtgccattacaaattagtacaagcaaattttgacaactgaggaaaaatagctttggaaatcttgagaaagaggaattagaattttagaaatttgattcttccagaaaccttttctgaagaaaaattccctgctcagaaacacaagatatataaacacatcactgctgtttgtggggcatgtgtgtgtgttttgttttgcattgtttttttctctctctccctctcagtccccagttttaagttagtataagaaactttaagtattctatgtattccaaaaggattttgaggtgagagaaggcttgccattaaaatcttagagtcatgtttatatctgtatttgtatttctctttttttttgttttgttttttgagactgagtctcgctcttgtcacccaggctggagcgcagtggcacgatcttggctcacttcaacctctgcctcctgggttcaagcgattctcctgcctcagcctcccgaatagctgggattacaggtgtccgccaccacgcccggctaatttttgtatttttagtagagatgaggtttcaccatgttggccaggctggtttcaaactcctgacctcaggtgatccgcccacctcagcctcccaaagtgctgggattacaggcgtgagccactgcgcctccgcccatattcctactttttaattttatttatgtattcaatttcagcaaaagggttagaatcataatacctgagagttagaaaaaatcctcattggcaaaggtttcttttctctctcactttcatctttccattttcctttgcctttttctggcatggaatgtgcttccagagagacatgagtctttacctgtctgctcaccctctttccctcttttctggcagcaccaggattctttcgtctttagcctctagttgttctttttgtttgatcacattaacaatttgtttctcgaaatttgcttttttttttttttaatacagagtctcactctgtcacccaggctggagtgtaatggcacaatctcggctcactgcaacctccgccttccgggttcaagcgattctcctgcctcagcctaccaagtagctgggattacaggcatgcgccacaatgcccggctaatttttgtgtttttagtagagatggggtttcaccacgttggccaggctggtctcgaactcctgacctcaggtgatccgcctgcctcagcctcccaaagtgctgggattacagctgtgagccaccgtgcccggccagcatttgctatgtttattgtactactgttggtacatttctttcaggaaaatgcctttctcagctcctagttgtgtgcacagccagagccaaacatttttctcttaagtagattgataccacctgagagatcattgaagtggtagaaataaatactcaggaagtgactatagaaacaaaatcagcaaacctctggctcttaagaagaccccagaattgtatatgtgctgtgcacagaagaaatattgctgggcttgataagacagcctggtagagtagagaggatgcagaactggatatcaggagacctggggcagctgtgggctgggaggagtcactttacttctctggaccttctgtccatctataaaagaagggacgagatttgaaattcttatgttctatgaattttgtgagttaacagaatatatgccattactatttgtttcttaaaacaattgtgagacatgtggtgaaataattacatatattggtgctcttgggtgaaagaaaaagcttgagacttactgctgtagcacaatgacctatatcagcggtccccaacctttttggcaccagggactggttttttgaaagacagtttttccatgaactgggtggggggatgatttcgggatgattcaagcacattacatttattgtgcactttattattattacattgtaatacatcatgaaataattatacaactcaccataatgtagaatcaatgggagccttgagcttgttatcctgcaactagatggtcccatctgggggtgatgggagacagcaacagatcatcaggcattagattctcataaggagtgcacaacatatatcccttgtatacacagttcacagtagggtttgtgctcctatgagaatctaatgccactgctgatctgacaggagatggagctcaagtggtaatgtgagcgatggggagctactgtaagtacaggtgaagcttctctccttcacccaccactcatctcctgctgactggtattagtccatggcttgggggttgggcaccctaatctatataatagcacatgtatagctcatacgaattagatatttactgtatgccagacattcagctaagcattttacttgtattgtctcttttaatactcactcctgcttcacaatataggtatattaatatccccatgttaaagaagaaagggagccccaaagagattaagtgatttaaacccaaatgtgatttatttcaaatcccctcttattcacactcataggctgctttagtttactcatgaacttccactttcttcttaaggaaaaaatatcctcagtgttgtgtgtgatttgggaaggacataattgactcaatagcttatgtttcttcttttcccccttatctttcttagaccacctagagatttagactccaaggcttgcatttctattggaaatcaggtaagaaaaagtcatgtctgccacctaatacgttggccattttatatgtatgctttctgactgaaaaatttattttccctagcatgctgtcaggggatgagtcaaaaaaagtttgcatttaaagggaagtggtatgcaaagtttttgctattttgaaagaatgttgaattgaaatcaggctattgtggttttgatggaaggtatttgaatagagtagatggttctcttgggagggcatttctcaaagctcagacataatctagttgccatcagtcaatagtgggttacagacacaatgaagggtcatggctaaagaacttcagtgaaatagcttcaactgagacattggcaagctgagtccaagttgggtttctgtgttgcctgggacaagcaggtgggctaccgtgggagctcctagacatctcttggcccttcttgtagcttcttgctttcagaggctgctttgacatgctagaaaatcttctggcccagaaataatccttagaacattgagagaaacgagatagaggataatgtgctctctgttctgtttatttttctctttcccattgcattattccttttctctcttgcagaactttgaggtgaaggcagatgacctggagcctataatggaactgggacgaggtgcgtacggggtggtggagaagatgcggcacgtgcccagcgggcagatcatggcagtgaaggtagagttgacattctcccaaatgttttatatctgctgtgtatacatttgtccacctcaattgtcaaccagcccttttaatagaagcaaaaccatcttccgtagggtaaaacagaaaagattatttgcagggaacagtattttcctccaaaggtatggaaaagtcttccttggtgtgagttgtatctactttttatttgtttttttaactcttaactctccctccacccattcttctaccatttttaatttttacaaaactaccatgtcatcatcacacttaaaaataattaatggcccaggtgtggtggctcacgcctgtaatcctagcagtttgggaggccaaggcgggtggatcacgaggtcaggagttcgagaccagcctggccaacatagtgaaacctcgtctctactaaaaatacaaaaaattagccaggcatggtggcacacacctgtagtcgcagctacttgggaggttgaggcaggagaatcacttgaacccgggaggtggaggttgtggtgagccgagatcgtgccactgcactccggcctggacaacagagtgagactccatctcaaataatattaataataataataataataataatgatacttccttcatctaatccggagtccaaatgaaaatttccttgatcatctcaaagtgtgtgtgtttgttttgtcctgttggattttcaaatcagcatcccaatgaaagtttacgtattgcatttggctgttatgactcatagatctcttttattctatattttgttgcttttaaagaattgcctctgaaaatcaagaaaccagaattgggagagaaaattgtctccatttgtggaaaaaggagggtaaaatatatctagagtaaatttgcatagtttttgagctatgaaaggaaatttaaaatcatttcatattattgagtaggtgttcggaggatcataaagaattaacatctctagctgagttaatagattggggctattgttaggaataatcaggtgacttggatccttttgcttttaaagaatgggaatacttttatcttgtagatttttcagtctgttcttctgctgacttgctaagtaggcaaaaagtgtgaagtcccagtgatattgtatctctcctatcatttaatgacataatcatgtttctgtaaggctacatttcctagtgtgacagattgttcttccctcagaagcactgggataggaatgaacagtttctctatttctctaattgcttctattttgtatagctgtaccaattctcttacagttgctgttccctccaaatactcttacatgttcccaaagaagagcttttggctttttattttcttgggaccccagataagcagcaaagtccttaatattgtgccctctttgcactgaacagacataatacagtaaaccagattgttttcataccttggaaatacattccaaaacattttgtcactctccaaaacacactatcaatttgtttcttaccaggactattcaggaaatcaaatgagtaacagccttccttattttcatgtgttacaaatagctaatcactttgggtggctattcacaatgtcatcgccagaacttgtgtcatgaactattttcacgatgggactccttcaggtccctgcctgcctcatcctcagagtagtaaccataaattttccatgcatttccattcagcggatccgagccacagtaaatagccaggaacagaaacggctactgatggatttggatatttccatgaggacggtggactgtccattcactgtcaccttttatggcgcactgtttcgggaggtaggtgacccttcaattcaaagtccaagaggaacaataacttaaaaagaagtttctttgatcacgtaaatgccttcacaatcatggagctctttcttgtttgacacatcttgtatacgggggtttacgtgtgtgcaatgatgacatgccctggagcaaggttggattgaaattatggtattttcaaatgtggttagcctttttaagatgtggagtttctcgtctcctttcttttttgttttgtttatcttggcagaactttctatatcgcctatagactgatttgcttagatctcttataatttgaaatattctggtcttttgactgctttaggagcttcatctagcctacttgtgtactatatagacttactttgatctcttttctctacctctgttttccactttagcgttatatggattatgaggcttcacctcattaaaaccagctttttgactgactgttgctggtatttagtgtgagagatacgacatggaggaggcatctagacctaactcctagacagtggtatcagtaaaggcctggatatctggggttgtattgcttatgtctgttagtaattagattccatttttcattaaggggtaggagagcacatgcaggttctgcttggctacctactggtttgctctttgtagataaccttgcttatttgtaaattcctttatgatcttgacagaagacactgtatttccccccaaaattcaagaaagaaatagttaattcttcaggatagggtttactgttttttttttttatttttatttctccctttttcatccttttaaacaattcctgaaacaattggtctccagggtgatgtgtggatctgcatggagctcatggatacatcactagataaattctacaaacaagttattgataaaggccagacaattccagaggacatcttagggaaaatagcagtttctgtgagtacattttgatccctactgcaaggataatgtgagaaataaagtccctatgtgtctttggacctcagtatgaagaaatactacctgggccacagctactattcgtacatgtctgttgacatttattggtggatggataaatacatgctttcctttctgagcactgtgtagaagattctagcactgctttggtttggcagactctaggttaaatgactctaagtgctgcattcatcagctatgaccacattcctggtgtctatattctgacattagtttattttgattttcatttatggatttttaaaatgttctcttgagactagtaggcatagaagaaagcagaaggaaaataaatagaaagaaggtcttctaccttcatggctattcaggctcaggagggtggagagaaaaagaaggaggacaaatgaacaagacagatgagggagacatcctctctgatataagatacagtcctctctggtggatggagtccaatttgtgtaacttcctatgtattttcctagataggaccaccactatttgagaaaatatctcactggtaacctaaagccaaggataataaaccttgatatacttaacattcaatttctttccagcaatgtgataaataaatctatcttgtgtttctcttgcagattgtaaaagcattagaacatttacatagtaagctgtctgtcattcacagaggtaagcatccatgagctgccttggctgttcctttgataaagttcatctctttcacctggagtccgtctctacccccagtcccccatgggtggaagtagaattgactcaggcaagagaactaaggggctttcctttgagattggatagcaaaccatataagtagtattccttatcatggctgaggacataagaagaagacgtgatctttgtcttacatccaaattgaatataaacacttgttagcaagcagagctatgagatcatatcattgagaattttagagaatatgataaaaattgatcttgtactggccatcacatgagagcttgttggaaaagaatcatgggtctcaagatcaaatgaattggaatttgcattttaacaagatttccgggtgattcttgtgcacatgaaagtgtgaaaaactctggtataaagtagagccctttcagacaacaggaggcaggatataatgatttatctcttcctctttccttttcttccttcttattggcctgttatctcttcaaccagccattcatccatccatccattcattcattttctatccccccattcatccatttattcatcttttaaaatcacttttaaaatgtaatagatcccctgagaggtatctgagaagaaaatatattctgattaaattatgcatcaggattcttatagggaagtaagataaatgtacaaaaaaaaaaaaaaaaaaaaaaaaaaaccaccttagaaatatgaaagtaccaagctgggtgccgtggttcatgcctacaatcccagcactttgggaggccgaggagggcggatcacctgaggtcaggaatttgagaccagcctgcccaacatggtgaaaccccgtgtctactgaaaatacaaaaattagttaggtgtggtggtgggtgtctgtaatcccagctacttgggaggctgaggcaggtgattgtagtgattgtggtgattgtagtcagggaaacttctgggaagagataaccagaaccctgtctttgggaagaataatggaatgtattggtaagtaagagggccttgtggtttggataattcttaaactctctgagcctggaaataatgtaaaatgtcttccacagtgtgcctattattgttagttgttattattaaaaattggaaaaataggatgaaggaagatgagaagaaaataggaaggaatacagataggaaaaagactgtagattattcacaactttgaaattaacattaagggttatttcaccattatgaaatatgtaattcatattagagaaaatatgtaaggtataaaaataataaaatgaaatttgtgtatcttctagcttaaagggaaaattataaaggataatttttaaagcttttgtaataatcttttacttccaattttatgggtgttatgaaaagtatcacaaagggaaaaattagctgtaatttcaaatgttattatccagagataatcgtagttccattttttgggcatatgggcgggtgggttaaatttttctagtcaaaaggattcgtttaaaatctggtctgtaatactgcttcttcagtaacctgccctgtggtctggaatacctgggtttatgatcctttacactatgtgacctctgacacatcgctagcagaggtttcaatcaaaatctgttgctttgggccaggcttggtggctcacacctgtaatcacagccctttgggaggtggggtgggaggactgcttgaggccaggagtttgagaccagcctggtcaacaaagagacatcctgtctgtcaaaaaaaaaaaaaaaaaaaagttagctgggcatggtggttcccacctgtagtccaagctactcaggagactgaggcgggaggatgatttgagcccaggagtttgaggctgcagtgagctatgatcacaccactgcacaccggttgagtgacagagtaagaccttatcttgaagaaaaaaccaaaccaaacaaaaacaaaggttgctttggtcatatttggtgtatcattgtgtcacagtctgcctttttgttctttgttttattactcctacgttaaatatcaatagatcattttgaattggacatttgattcagtaataattttttaggctcttactacaagtatgagggtaatgaagatcataaaatcagtggagaaaacagttctttgtatggagaaattcacaattctacaaggcatgaacaaaacatgaaatagaaaatcaagttgaaagcaataagctgttgttaactgtgggtcagggatggcagttacttctgtgttgggcaacttggggaaaggaagatgaaggacaaatggagattttaggccctctggtggcagagaaatgaaccttgaaagcaggctgaaatgatggcatcctggttgttttcgctttcagacgtcaagccttctaatgtactcatcaatgctctcggtcaagtgaagatgtgcgattttggaatcagtggctacttggtggactctgttgctaaaacaattgatgcaggttgcaaaccatacatggccgtaagtacattagctagggtggcatctggtaatgtcactgccgacaaatcatgctgggaaacaagaaatggatggccacagagggaaaatggaaatgtacctaagactccagaagtagtctgcctcttagtatttcttcaaaattttatgtctgaaatctttactcacttgcttcatatattgtcttagtttgttcaggctgctatggcaaagtaatgtaagccaggcagcatataaacaacagaaatttatttctcacagttttggaggctaggaaatccaagatgaaggcaccagaagatttggtgtccaatgagggctcacgtttctcaggatcatacatagcaccttcctgcttagtcctcgcacggtgaaaggggcgagggatctctctagggcttttttaataagggccccaatcctattcattagtattccactttcatgattcaatcaccccccaaaggccctgccttctgatgccaccacatgtgcgattaggttttaacctgtggattttggtggggcacagacatagttatatatatattactttaaaaaaatcaagtgaaagagatacgttatttgaaaaaatatatacacaatacatatagcctgcacagttttccacactgtattgcaggggagtattaccttgtttgttgaggacaaaatagtaaatagagcttaaattacccaaacaaggcagttagattagttatgagaggacctcacagctgtgaagattcaccgtcattagcagagaccttgcaatcccctttaactggaggaacggccactagattctacctggaaatggacttgtgctttgaattgaaaagcttcctgtctgtgtttagctaaaaattgctcaggtctattagcatgggacagtagcccagtgacacttgttttattgagttctggactgttcatgttttaaacaaggataattctagatgggcaaagtagctttataatgtataccctgtttcttcttaaggcaaattttaaatttgttatgaaaggaacttgatccattactgtgtccaagaaaagacaaacacagaagaagggaaaccccacggaggcattgatatttgttgtagttaaccgggtcttcttggccttggtggcatgttaacagcttataacaactcacttggcagctggtgctacccccatccccagagactattgagctaagaacgttatctcaattgtcttcccagtttctcagttgtctgtcttctttccagcctgaaagaataaacccagagctcaaccagaagggatacagtgtgaagtctgacatttggagtctgggcatcacgatggtagtgtatgccaatcatcatgaactatgaggttgtgggtaatgaaactagaatgaggtggacgttgggttcaagaaacaaatgccctaaatgctggtttggggcgccctctcctgctgagatggtaggagattttgagtaataattgtttgtattgtggtacaataaaaacactgatatgggattggggaaaccaatctttctcttgattccacctctgacgagctgtatgcctttttgagtaattgttacagtcacatggactatcttcctatcctcctctgtaaaacgagaggatctgaccagattccttatagtttaaaattaaattattcgagccaaggcaagaagcttaagctgtgcaaagaatgctaatgtgcgtgaaccctgatagggccgtgttatccaggacatagactatgcttcccaggatatttttattggagaagtagaagtcaaagtctgatcaggtcagtgtattagttcgttttcacactgctgataaaagcatccccaagactgagtaatttaaaagaaaaagaggtttaatggactcacagttccatgcagctggggaggcctcacgatcatggcggagggtgaaaggcacatcttatatggcggcagacaagagagaatgagatgagacagccaagtgaaaagggagatgcttcataaaaccatcagatctcgtgagactttttcactaccatgagaaccatagaacagtatgggggaaccacccccatgattcaattgtttcccactgggtccctcccacaacatgtaggaattatgggagctacaattcaagatgagatttgggtggggacacagcccaaccatatcagtcaggtatatcctcaatacatgataaccaataggatgatttccttagacacagccctaaagttatatgatttattcataacttattcataactttggtgattgtaaatttcataactttggtggtcatacattttcagtggatcaccaaggtctggaattatccactgtggtcctggctcctccccaggcacagcagctgaataaatcccatgagttatttctcctgcctgcccagaaagcacatgatcctgtaatgcaaagtggccttttctcaagtccaaaaaaagatctgtcatttggttctaggttgctttttctccctgtcatttcaccaagggacctgaaggtggcagtagatgctcggctctggaaagatcttaggctgggaattacttgtcagagcaaacgtttgaaatcctcgtagctttacatcctgaagtttaatacggttggcttacaatttttatgaagtgccacagtgggttttagtgagggtccccattttagataggcttaagtggctgtgtctagtaagtaatatttaaaaatccctagcactaggaatttggggaaaattgctagagaacaaattattagtttatttcctgcccccctacccctggacttatacttgaactttgccttgtgtttcctgctgtctatccacaaatgaaacgtgggtgattccctaaagcagccctgttgaaactgttgtctccttttttcttcttttctccagattgagttggccatccttcgatttccctatgattcatggggaactccatttcagcagctcaaacaggtggtagaggagccatcgccacaactcccagcagacaagttctctgcagagtttgttgactttacctcacagtggtaagacagcctcacctcccaagtgtcagtgtgaaagaagaagatgagttctcatgaatttcttccattggggttgaatccatcatgcatacattcattccgaaagcatttgtggagtatgccccctctgctggagaagcaaagatgaccgtatcacactccctgccctcactgggcccaaagtcaagtagagaagtctcataaatgaataattatagtataatgtggcaagtccagtgatagagataggggcataggcgatttaaggaactcagagggaagacctcaggataggcttttctggaggagataaatctggagctgcgatcacgagaggaattttccagacaaaagggaaataggaaaggaaacatattccaaacagaaggaacatcattcacaatgtcacaaaagcaagaaactcctttatgtgagctttaagcaatttgatgttgattaaagcataaagagaaagctgataggacccactagaggcctggggataggaagtagaggcaaagaattactttcggtgagaagatagtgggtagtttgagagtgtttcttaggtccccagaagtcttgtagaaccttggttgctactgaatacttgctaactgtggagaaacttgcccaccataagagacaatgctgaagttctgggaagggaatccaaaggaagttggggtggaaagtgggagggagccatactcatgaggtgaactatattttcatgaaaactgccagggcagtcaagaaaagcaagaggggaaagtattctctagataatccagtaatttctatctgcatagaggtcatgatgcctagcatggcttgatagtaatgatcatggcaagtgatgctggaagcaggatgccagaagtgaagcacacccctgagccaggttagcgtatttggccatccgggagaagtagatgagaattaggaggaagggggctcggagatggtggcaggcccagctgtgaccctgggaggggagccgttctgagtactcactgctggggaagggcctggagctctgaaggctgtttgaggtactgaggaagctgaaggaacatcttccccgtggcttcattcctcagcctccatgctttttagaagtgctgtgaggcagggcacccgcgcctgtaatcccagtactttgggaggccaaggcgagtggatcacctgaggtcaggagttcaagaccagcctggccaaaatggtgaaaacctgactctattaaaaatacaaaaaattaactgggcatggtggtggacagctgtaatctcgggaggctgaggcaggagaaccgcttgaacctgggaagtggaggctgcagtgagctgagatcacgccattgcactccagcctgagcaacaagaataaaacttcgtctcaaaaaaaaaaaaaaaaaaaaaaagctgtgaatacagcattcatcaggaaacatggaagaaacataaaacaaagcaactgtctgttgcttgtgaacctaagagctcttcgactctttgttagccctaggccccttctcattcctggtacttttccctgatgatgtatgaggctggtctgcagttgtttgtttttgtttttggctggatgactagagaggggctggagcctcgagcactagtgtaatagttgttggatgcctcttaaaagatatatcttctaggctgcttcctgtctgttttccttgagggagtgtgctggatgtggtagtacctctgccaggttgacctgggttcatgattttgccttctggattcaaagacttgttttttgtggatggttggttggttggttatttatttatttattgccttatcctcagatgtttaaggtcacatcaaaaaaagggatgaggggccgggcgtggtggctcacacctgtaattccagcactttgggaggccaaggtgggcagatcacttgaggtcaggagttcgagaccagcctgaccaacatggtgaaaacccatctctgctaaaaaaacaaaaattagccaagtgtggtagcacacacctgtagtcccagctactcgggagattgatgcaggataattgcttgaacctagaaggcagaggttgcagtgagctgagattgcaccactgcactccagcctgggtgataagagagagacgccatctcaaaaaaaaaaaaaaaaaaaaaaaagagatgaggcatcttgggtagtacagaacagtagttctcaagaggggtggtaatggggaatgatcttatctagctaagtctcttcaaattattctccctattacctttctcccacctatccccttttcccaagattctgggtgctttaggaaattttggtaagaacgaggctggtgtgaaaagtttgagaaagctgagtctaccattgtgaatcaccagtttaatccaatgattctcaactgtggctgctcatttataaaactctagtgagctttcaaaatcactgccccctagacctcatcctcatagactctgatttaactgatctggggaggggccaagatactaatatatttttaaatgttctcaagtcatttttatgtacagctgcggtgataaccccaggtttagacatatgatctatggacctgccatcaactagtttctgtttagaaggcttattttcttcaatttgtttaaaaaaaatcatccaattgcttgaattttctttcaccagtgtattttttctcttactggaattttctccaaagaatcagagcattgaaactttttagagatattttaaaatgaacatcttgagaaataaatggtttttaatttttttttttttttttttttttggagacggagttttgctctgccacccaggctggagtgcagtggcacgatctcagctcactgcaagctccgcctcctgggttcacgccattctcctgcctcagcctcctgagtagctgggactacaggtgcccgccaccacgcccggctaattttttgtatttttagtaaagacggggtttcaccgtgttaaccaggatggtctcgatctcctgacctcgtgatccgccccgcctcagcctcccaaagtgctaggattacaggcatgagccactgcgtccggccaatttttctaattttaatgtatgcacacatatatggaagttccagataccggcatcattgctcttcatataatgactgccctgtgccttctctctccttataacacccatagtgccttcatggctgcctgcaaagatatccccttctctctcattttcttttaattttaatcccagctaccacagttcattaattaaaaaattttgagccgtagacatgtctcagctttcctgaaactgttaattctattaatactgtttgctcggtgtcatgtcatttctactcaagtaagtcagtttgtcttatatctgggtatattaaaaacaataccctgtctctacaaaaaatacacaaattagctgggtgtggtggtgtgcacctggggacccagctacttggaaggccaaggtgggaggatcgcttgagcttggaaggctgaggctgcagtgagccataattgtcccactgcactccagcctgggtgacagagcaagatcctgccaaaataagataaaattaaataaataacaaaatgcaatataaaataaaataaaatatgaaactatctagaaacaaaacccaaatcactttaccctagaagtcattaaaagataaattttccttcctcaaagtgtcagtattatagttctggtagaatgctgtacttaagaatatcagttgtctaaaatagtcattttgttggtatgggaattaagaaatagaagggaatcgttaattctgaattttatgagcattcttacttatcctcagtttgactttttcagcatgcaagctctactatttcagatcccaggtcaataactttttttccctgccacaaaccaccaatatattttctttgatatcccttaagtatgaacattatttttcaactgggttgaaaaagtcatcttatactcaaaaagtagcactgattttcttttagagtttatgactggcctagaactttacggaagcaattttatttttcatacatatattaatatatgggtacatacctccagccattagccatctagtgattttacttgtttgattactgaaagcttgaggtttgatctggagcttggtggaaagaatggaaaagtgataatgttaacagaagagtacctcttctacctcttcatgaacattccctgtgcacgtaactcccctttatcagctattcttttatttttctcatgaataaagctgtgttattgagacataacttcattaaaggacctttttttttttcgtgagctccatgttttttatatttttattatgtaggctatggtcctcccagacttctcagaaaggccgctctatgtgctaagtggggaagggagactacggatttcaaaagtgaaatatttaatctcaaatttcaagatagatacatctatgtttttattgcctacatctgtctttggtatgcagaaaaagaacccattatacccgcagcctaggtaactgtcagagtatttgtgaacttgtgtatcctacctaagcatccgatgtcacaaagctactaggtatcatacacctgcctaggtatcatacccgtgccaaggaatcaacttggcacgatgccatcaccatgttgcaaggtaccataattctgtatccagggaattgatttggtagccactcttgtctggcccatcagtactgatcactgcttgttagttgacagtaaatcacttagtttgtagggtgaagtagaaaagctctaacaggctatcatcaccacacccaaagttagacctagagtccagagttccagtttttgcatttcttttgcagtaacatctgacaaatgttatcttgaaggagaaggaagaattaaccatatgaacgtaaaggaaaaaagcaaacccacaatggtttcttacaaacccttcttttctgtatttattttgagataggactacagaatgagattttcttcctctttttcctatatatctctttcttatcgtaggggttttaaggagttcttgagttgggttgtgttgaccatgtcagccttgttttgagattcatcatagagaagtctaatagagaagtcttgctttctagtcctgcagaagggttaacaaacgagttcgcaaaagattggaatcttagccggtttacacttttcattataaactcttcctataggttcacagaaggaagtcactggaagtcaactgccgagtgccagatcagctggacttccctttggctttttctccaggcctatttaagaagctgtgggcccaactgaccagtctgatggcatattgaagggtagtggaggcccactcaagcatcaatattgtctgactcagggaaactagcataaaacacagacagtcaaatacagtctcctacttgtgtaggaaggacagtaaaaagaggcactagatgtttatttagcttttgacaaatgtatgccttgaaacgcgcaatgtgtttttattctgtggatgtaccaaatagcccttcttggaaatgatcgggggaattcaaataggcagaaatcctctggtcagcacaaactacaagctagcaattctcaagacagcatgagctgttttttagtgtcagctatggtcagaagcgtgtgttgtggcatttggaaaaggaattagggcagttagctaattgcacgcttgaaaatgagaagctctttgaaaattcaaaagtctgattccagttcaaaaagaaattggtgttgctttgaactccaaagttgttattgtatactgaatttcaagtacttcctactaaacatggaaaatttgctttccccccaaccttatcctgagtgtattgctattcttagcccatgttttgaagtgttcttgatttaaaagatggagagaatgggttatatcagttccattaatttaataaacagccttgctttgcggtgtaagtattttccatctatattctgcagtagtgtttggggtagattgtgagctttctaatcaggggccatgagtcaaggaatagcctattgaccagttagtcttggaggtttcaggaatccttaacactttatgatggatcaactagggtactttccccatattttctttatacagagttaacaaaaatctggagattttttttttcttttttgatacagtctcaccctgttgcccaggctggagtgcagtggtgcaatctcagctcactgcaacctccgcctcccaggttcaagtgattcttgtgcctcagcctccctagtaactgggattacaggctcctgccaccatgctcagctaatttttgtatttttagtagagtcggggtttcaccgtattggccaggctggtcttgaactcctgacctcaagtgagctcaagtgatccacctgtctcaccctcacaaagtgttgggattacaggcattagccactgcacctggtcgagaaatctttataagctgttccagaagtgaaaagataagatatcctgactcaaaatcagtattttaaaaaaatacagcatttaaaaaaaatacagtatttttaaaaatggagatgtttaagctcatctatctgttggaaagagacagtcattttatcttttctgctaaatataaggtaaaaaatcagcacatttttacatttgagaaacaagcttttcttcctgacattgccttggttctgttgttgaccaatgaaagctagtaacggagtgggcctgggtcctcagtgagagtgttccagatgcaatgcggagtttaaggtctaaatagagacagccagaatcaaccatctgaatattgagtgtggatttaatgttgtgcttgcactttttgttatttacttagcgtgttacattgttccagcgatagagaagcatttctggtttttgatttgctttgaacaatagtgggaaattcagggcttctagcctgtttgtttttttttttttttttttaccagggtctgtgtgcaagtcagcaacgctcctgggatcacattgcttcttctgtgtttctttctaggtaaactagctcttgaacttagaaagaaacacttttgcttcctggggttgagggcaggagacggtcgtggtgagaatgtgcttaaagacaaagacaaaccagctggagatggtccttttaagtgaaggggagaggaagccgcaacaaggagggaccacctattacacaaagcacagcgtttcttaatctctgcactcatgacattttgggctagagtgttctttgttgtgcgggattgcccagtgcattacaggatgcttagcaacatccctggcctctacctattagatgccagtaacaccctgccaccagatgtaacaaccaaaaatgcctcctgacattttccatatatcccctggggagcaaaatgacctccagctgagaaccacccacgtagactctcagcatctaggtacctacaaaaccatcggtgggagttacacggactcattcatttcactcagcacacattcccatatcaatcagactttgccgcctgttaattcctctttctaatgcgctcttatttttatcctcagttgagatgaaactttctctcataggttgtctggtcactgaggtcactaggtcctaggtctgccctcagttccaggttgaaacttctgtcctcacatctacctgtagcctgtctcaggttccctggcttccacccacagcattgcctggaacaaactggtaggctgattttaagttgttttggttcaaaaactttctctctctctctttttttttttttaattttatttcgttttaaaccacagtttctcaaagtgcctgaactacttcgctctctcatggttctgtaccttaccccgtcatgcttagcttcggagggtgaggcagagctcacgtcacacatgctaggtctcatttgctcaaaatgatcccttagctcaaatcccagcaacctaacaatcagttacattttgattcctccaactccaggcaaaattcctttccattccaatgccaggcaaagctcctttccattcatgtatgattttgtggtccgttgggcacaggagtctgtaggttgccttgcaaatcatagttttcaaaatcatctttttctgcattctgtaacctgggattccaactccaagtaaattgtttcttttcttttctttctttctttttcttttttttttttcattttaaggccagagttggatagaggatagggatgggctgagaatggggtgatgggttggtctcttcatcttacagttttattactgttaaataataagtaacagcatttattgcctccggtatcaaatgttattaaatgtctgtgtcaatggagagcagaataaccagaagtcacctgacaatagcgcatgaccataaagtatttctaacaagaataattgctgtcactgagtgcgctctctcttttatcagctgtcataaacaggtcttattacctttgtcataaacaagtagtattaccttagaaatgttatggggggttgggcacagtggctcacacctgtactcccagctctttggaaggctgaggcaggtggatcacttgagcctaagacttcgagaccagcctgggcaacatggtgaaaccctgcctctacaagatacaaaaattagccaggcatggtggcacgtgcctgtaatcccaactactcaggaggctgaggcaggaagatcacctgagcctagggaggtggaggctgcagtgagccgagattgtatgcccctgcactccagcctgggcaacagagccagcccctgtctcaaggaaaagaaaataaatattaggggtttattgcttctatctcaggcaggtttggttaggactatataaaagcaaattatacattcatgggaaacagaagcaaaaagaaccaggtacctgacagtgaagagataacaaatggcaatgtaagaaacacttgccaatttctttgtctgtggaaatggcattaaagctgctttgaaggaaagtagattttttgaaataaaatggctatagatcagaaaaattagtgtgcatatcatcggtaaagtatcaaaaggaaagtacacacacacacacacacacacacacacacaactatttttcccattaaggcacaaccagggtgatttaaaacatgatacataagtgttacagaagaggaaagtcaagataggaggctgtgttttcaatacacttttaaagctgattatgtttagtgttctacaggttctgaaatccttgtctaatgaaaatatatatggcttctagattttaatgattatttttttttctttaagcttaaagaagaattccaaagaacggcctacatacccagagctaatggtgagtattgttagcaacgtaaacatgactatactgatagctacaaaaggcaaagtcactaagacctaaattatcatcacatcaccatattggaagagttggttcattgatacatcagtgacaggaattgaactccaggaaagagagttaaagagttcatcctacatccttcttaaacataggttgggacctgtcactattcttagtagtttttttccaggctaataaacctgtcatgatacagagcaaattatgtgtatacaatttatatttttgaatttaaaagatatgagaagcctcatattactaagataaaattaaggaaagtatgatttaagagatttcaatactgaggaaaacttaaatgctctttgactgatcaatttttgatcaaatatctgggctaaattagatgaacaactttttggggggtagctaaggaggaaaaaaaattttgctttttgttttcactttggtggaaaaaagtaagacaaagcatgattagtttaaattatactccctcagcattcacagtttatcacttgctgtgtctataaaaagcaagagtgaagaaagtaatatcttagcattgtttgttgtattaaaataacgtttcttaaattgtggtaactataggccgggcatggtggctgttcatgcctgtaatcccagcactctggtaggccgagttgggcagattgcttgagcccaggagttggagaccaacctgggcaacatgacgaaaccccacctctacaaaaagtacaaaaaattagccgggcatggtggcatttgcctgtagccccagctactcaggaagccgaggtggcaggatcacttgagcccaggaagttaaggctgcagtgagccgtgattgtgccactgaattccagcctgggcaacagagtgagaccctgtctcaaagaaaaacaaacaaacaaacaaacaaaactctggtaactacaattctaagctaattactaatgattctaaaagctaaatacaaatggcaaggacctaaacttggcaatgctttgctttatctaagtatatgttgaatgtaggagaaacacatttttgggggggagaaatatataaaattcagactatttgctaatttatgttaattcctagatttgtttcaattatcaaggttttcattttagcaggggaaggaagagttacgttcatgcacaatttcaaaagcaataaaacactgacaccctttcttactggaacacagttattcatcaggcattaaatgcttgctcctctgctatcccagccacaagccctgctgtcttcaagaccaactcagggcatgtcttagaagcatggattcctagtgtcaaatgctgtggtgaggtggcttagatatgaggaagcacagcttggaaatgtcgagtcaggaagagttacagaaagctgatcaggaagatgcgtgatagttacagccaatcacataggttttcacttctgttgcctaagctttgattgaagattgaaccattttgcaactggatgaattggagatgagaccatctcattgggcctccattgggtgcattaaaaggcagcccctggtgctcagcactctaccatctttattcaactaaaactcacagttaaagaaggaaatatgagtaatgtttgagaaaatcctagcatagtacatgtttaagttgaatattttcttcccgattattttttaatagccagtcaaaggcttttttggttctgtttactctttttaaatatgcttatgcacccgctaggccattttaaaattaatttcatataaaatacagtagatatacagttattcttgtaggatactatggagcctgtaatcctattttatttatttatttatattttaatttttattttttagagatggagtctcattatgttgcccaggctggtctcgaagtcgtgggctcaaacaatcccccggcctgggccccccaagtagctgggactacaagtgtgcacctgtactcctattctaaagttgccatgttttgtaactaagttcagataagaagaacattttctatatatttctggctactttttcttcttccaaatggtttcggatcagaaatttcactgaaacacacttgagaaaagaatgcttaatatacatgggcagctgatgtcaaattctacatttgtaatatgttctaaccctgtgatattttatggcctacatatatatcaatgttataaaatcatgtcagtcccccttttcttcttacagcattagtctttgtggtactggaaatggacttgccttttaagactataactgttccctgctttcctgtggaactgaggttttcaaacggaaaatctgagtccaaactccctgactttagcattgggaaaacacttgctgagaggcaattgtttagattttaggagttggtgaggaagtatgaaggaaaaaaataatcctttttccaggtgaaggacagtttaattaaggccttaacctagacatgtccctcttatagaaatcccaaatgtttctctccctaacacggattgaagggtgtgtattctttaagatcatgtcatttgcttcttctctcaaatgtcactggggagtatgactcagtagaatttgttcttctaaagtaggtagcagccaacgatttctgtaaaggactaaatagtaagtattttagtctttgtaggctatacagttgctgtttacaatggcttaattcagtgttgcaatgtgaaagcagccatatccgatgtgttaaaaaaaaaatggggtgtgtgtggctgtgttccaataaaactttatttaaaaaaacaagcagtgggctaaatttggcctctgggtcataggtagctgatccctgtcctagatgataatcaccagaaaagataaccagttcattcaagtgattgcccagtgaaataatgttctccaattatcttaggaagttctagattgaactgtatgttaaacaaagatgcctgacccattcaaaaccatagtcttaagggatgaggtgctgtgcatgggacagggagacctgctggtgactgtagcttgtctgtctattcctcgtagtatgttcacggatctccatgttttcttcaggcacatcagtgagactaaatggtgtaaagtcctcccttcttgtctccctggctcctcttttgggaaacccagcctggtattatagtctgagtattattcatagtccctcatttgtcaatttcctggttgctgcccttgctaatcttaatccattgcttataggagggactgggttccctcttaaccttttacagcctcaaaacccacacaagaaggcaagtcacactttccatttgtcatgcctacccgttttcccctccccctgcccttctggctctcatagcattttctcaacctgggaataaatggaaagatgcctagcgattttctttttttttgattaaagacttcaagtcaggttatttaattcatttgcagactcaggcaacatctactgagctaatagccactagcagaacaaaaggcaaggtggggctggcaggtgttggaagcagtcaccaagataatctgaggtttggcatgtcctgttttgatagtaaaaagcttttaagtacattaaaagatttccaaatgtccagaggatgtgggaaagctaataagcatgatggtagagtccttggtaagtgtgctgtgtatgtggtgactaatcagaagtatggctgctatttagtttttgagggagctcaggaggaaggacctggcactcagagcttcagttgatttcatgagtgtaaggatcggagccagcactcaacctgtgtcctcagatgggcaaagggagaaaatctcttttccattttctgagtcatgatacttaatcgcgaccagctatcttctttggggtttttatttctttgttcctttcccatttgcattgtttcctagagtttccatgagcaggaactcagttttccacggagctgactcatccaaccctctgctgtcaggtttaaaacaaatataattagaaaacctacagctgggcaacataaaggttgtaaactaaactccctaaagtcaggggaaacagagtgagtcacttatgtgtctggatgtaaaaatgcttacatttagctactcaactggtcattgaaaatagactaccaggcaatcaagggagtgagcatgggaggtgagacacgtgggactaagttctacctgtaagaattatccatttggggtaggtttggttggttctatttccactataagaactgtggctcatgacctgatatatctttctaagtagaggtggcaggttccactgtgagagctgggcacttattgtaacaaaattgagcaatctggggagaattgttctagtgcagagaaaatggcttcctgctcaggattgttttgaaatgcatggcctcttgaatcacataccatgcttgttcccctagcaaagcataagacttgttatgtttttagagtttacttgttctgagctgtgaggatagagactcttcttttcccttttcaatctttaatctccgagttcagttttctctgcacataactagagtttggcagtctacattatttttcagatggatcaactcttcatcaggagagacataaataaagctcgtggcttggcaaatggctttaactgttttagtctaaaccaattctccaacgtcaagggcgagggctaccttccttgcacgtttactgttcaacaaaattggcttctcattccatcatctttttcctgagaaataaaagtgcatactgctggccgggcatggtggcacacgcctgcaatcccagcactttgggaggccgaggctggcagatcacgaggtcaggagatcaagaccatcctgggtaacacagtgaaaccctgtctctactaaaaatataaaaaattagccaggcatggtggcatgcacctgtaatcccagctactcgggaggctgaggcaggagaatcacttgaacccgggaggcagagtttgcagtgagccaagatcgcaccactgcactccagcctgggcaacagagcgagactccatctcaaaaagaaaaaagtacatacacctatgaattgtcttattatcttactactatattagcctaaaatgaccttgtggggcccagggctatttgtaaatcagagtttgggttgttttttgtcaatctttgtattttgctgtagatgagacttacgtagcataattacactttttttaaaaatttaatatagtggaaacctagagatatcaagatggaaagagtgacaactaagagatatctttaaaatgtttgcatcactagatgtgtgcttgattttggaaagggtaggaaaagcccagcctagctctgatagggatacttaatccctgtaccaagcagatctattcatttgctaatctcatatattgattgtcagtaagacattaataccatgttttttctttttcttttccagcaacatccatttttcaccctacatgaatccaaaggaacagatgtggcatcttttgtaaaactgattcttggagactaaaaagcagtggacttaatcggttgaccctactgtggattggtgggtttcggggtgaagcaagttcactacagcatcaatagaaagtcatctttgagataatttaaccctgcctctcagagggttttctctcccaattttctttttactccccctcttaagggggccttggaatctatagtatagaatgaactgtctagatggatgaattatgataaaggcttaggacttcaaaaggtgattaaatatttaatgatgtgtcatatgagtcctcaagcttctcagacttctcttattctttacaaaatgaatgcattggccctgacaaaaaggtgctacggtagtgatgaaattataagtagatttgtagtttgtcccatttattattttaatatttatgtttaagtgcttggttgaaaagattccattttatacaagaagggagattcaaaaaaaaaatataaggttgggttagcaatatttatagggcttttattttttaagttcaattgtgtctgtggtccagaagaaattatttaatatgcatctttgagaatattataaaaatatcaaaaaggagctcttcttgtgaaatgtctgttccagctgttgtgactgctgccatttttgcaaacatctgcccaatcctgggtgatcaccacatcttttaggggaagtgacaagatgctctggtcatactctttttcccaactttggaaaacataaaaatcactcatataacagctcaaagagtaaaacatttggttcttctgacacttgtggtatagtattagtggaaagtgatttgtaatatgattttatatccacctacctattcatctacctgtgtgtatgtgtgtgtttgtgtgtctatttggcaattcacaagtcctgccaagtggtttctatgagcatctctgtttggtaaggaggacaattgtcagttttgagggggacatgtgttaaatcacagaaaaaaatggtgccttcttctgcgtttgtccctcctgccatgtgtaagttgtaaggattgcctttgtagttaatgtactctttggctttgtttgtttgttttcttcttcagtgaagcagccttactattcatagaagggctagaataggagaaaatgaaaggtagtgagtaattctttgataagatgaggaaataatgggaaaggttgaattaattcctgggcatggactaccagatgaccacaagttgcgttgaggccgcatctttcttcagcagcgtgcaatagctggctcctctataggagatgagcttcattgggagttcctagcaagttgactaaacagcaaaagttctttctcgtgggtaaatatacccacaggttctatgatttgtagctctaggtttcttgatgatcaaggagtgaagtaattgacagggaaaatatagacctatgataaataaccaggaagcattgcttttggacaaggaaggacagagggttttgattttaaaaagaagaaaaaaaaaccttattttttctttcttggcctcaagttcaatatggagaggattgcttccctgaatcctctcttccttccccttttagattttgaagtgcaatcatatgtttttctctgtttgcattttttcctccttgttcttgacaaggaggagttgctcctgcccagaatgagcgtgacacttccgaacacttcttcatattcagttccaagatatatctgcttgattaaacatgagcttcctctgctctgaagctacctctgtcctcattttattctagccagaaaaggagtatcaccctagtgattatggctgttcactttcccatctatcttcctaaatctggaagttcttctcttggagatcaagagaaaaattacaattgtattccttactttattcacccacctatgaaaacaggaagcaataggaaaaaaaatccggttactccattttagcttttggtgaacgatgtagagcaaattgtctctctggtctaggtccgattactcttacctgtttttccactttgagacattctaaacagaatgtgtaacttctcatatgtatgcctctcccatctgtgaacctaggccaaagttgcaaaaacaatcatattaatagtagagtagagaaaaagttagtctatggttctcaaccctcgtgtacattggaaccatctgggagctgtgaacactgtcgctgccaatgttccagccaccagagatttggatttaactggtggggcctaggaattggtgtttttttgttttgttttgttttttacacaccttcatgtgattctgatgtgaagctgggttcagaacacttatctagtaccttctaaagagaactgacttaaatttactttcttttgaacatttgcagggagtaacatgccattgcagaaagtaacaaaaacaggtcctatttctttccctgtcctcatcagtggaaatctctttgtcactctgagggaaggcatgtacctgggatactgataggaagtgtagaacaccttttccccagagaagcaatattttgcactgttattaaatatcttacacggtaaagtcaaaagaatgacctgatagcctcacaagactaaattttagagcatggttttgtttttggaaaactgtgttgtaagtgccaatcaaccaacttttgaaaaaatcaagatacctaaactatatataaatggggagtattctgtacatatagacttatatataaagacatctgtgttcacggatgaccctcaaaatagttaatgccccaccagcatagaccatctgaatatcagccctgtctacacctatcaatgtattacaaaatcagtatagctctacaaaagagatcatgcttatttccccagatgtatttgattttgtatcatataattgtccatgttataatttttgaaaatgtttattaaaatagccatcttttttgatattattggtttaagaggtgtgccaaaaaaagtaatatgcataacttttaagactattaccctatgtttgtacgtatgagtgaatattgcccaccagagtagccatcttgagagactacatatttatattcataatgctattaaattatttttgccactcctctttcagaaaaggctttagaatccactccctcctctgagatgtgtgtcatcatttgagaattcttacttaggttttgttgttgtttgttttgctttttacaaaaatccttagcagatgtttccctctttgatttacctgccttgtttatcagattttgcacaaagttgtgtttgacaatttctagaagttaaatcttccctcagagctggagttttagcatcattgactctttgtaaaacgccatgtcatgggctctgaagataatttcaaatgaagatttccacaccccgcccccaccacccctgcccaaagtgcatgattatttttaaccagagtcattcttccaccagaataagtgtaatctcccaaaatgactactttgaaggagatagaacccccataaaggtatatgtttgttgataaaatatcaggtcatcacggattttgcaagtgaaagtcacctatcttctatgattgaaggtcctgatgtgggggaataatctattttttctaaagactgtgtttggtcacactgatttaatcagaacaaatgggttaaataagcagcttttatcacagttaagccatctgaaatggaaacgagtatgtatgggcatggcttgaaattgtttgtattttacagttcttgtatatccttcaagcctaacaaaaaattgtatgtgccagagattcctaaactttctgtgttcagggtgccattagttgtcttggtacttttttcatggtgccccaggtcaaaatatatacttaatagttcagtgttttaagtaattaggtcccaacagcttaataatagcagtttgcacagtgtcctgcatatatcactatatttcccttaaaaatttccagcattggctgagcatggtgactcacgcctgtaatcccagcactttgggaggctgaggcaggtggatcacctcaggtcaggaatttgagaccagcctgactaacatgatgaaaccccgtctctactaaaaatacaaaattagctgggcatggtggcacatgcctgtaatcccagctactcaggaggctgaggcaggagaattgcttgaacccgggaggcggaggttgcagtgagccgacatcgtgtcagtgcactccagcctgggcaacaagagcaaaacttcatctcaaaaaaaaaaaaaaaaaatgtacaacatcttgcttagcctgtgtgtgttctgtggtaccttggaatagctcagtacataatttggggaccacagatatctattatgccaatgtttgcactgtctgctgttggtgaccctcaaaatgaaattcttggccactcaactctccacattatttcactctttgttttgttattattagtattcttcttgcttgccattggctaattcattttttaactgcaaccctactcttctttgctgttcatcagccctgcaatgccgtagtgtcttagtctagaaaaatgcaatactcaaaagccccagcatcggaggaggctggtgctaagatggacagggttcctgatttctctcattgaacttgatttagtgtcttgggaattataatctcaaaggaggcagagaggggttaatgttgcataatttatcactaaaatgtctttgttgaccaaggggctttattaattatgctcagagaaacaattctgtttctcttaaaagtgtctaacaaaacacttttttctttggcctgaaaggacaatggatacctagttcctaatttcctacccaaatgctgttttggctgtgttactccctctgccctcgaagctaagatttatatatttacaaaatttattggagctggtagtcagatctagtaaaatggattaaatgtcaattgtgctgggattttgccttaacatctatctatgacttgaagagggatttgttggctcaaaggatcttctgcttttaatgaattagcaagtgaaaaggtatttgaataaatgtcaacttcataggactttttttttttttaacttttcaaatggaaggtgcagttttcaattaggcctctgaaaatttacatagtcagatggaaaaatgccagagtaaaatctaggaagaaggagctaccagacccgatagaatagaaagaaagctattttattctcggaggtctatgttcctcttgtgtttgagtgcctctagcactgttaaatgtgctgacagctaaagatgctctttgggttttttttttggctttaatttgggtactatggattcttttgggaatttgttgaaagctaggaccttttccccaggaaaatttacattgtatatgaagcacataattttgcaaactttttttggttgttgttgggagggggttgcagtttatatactccacggggttagtagctctgttctgtagaatattgactgtgacatcctagaccacggttggcaaactttttctgtataggaccagatagtaaatatttttggctttgtgtgttataccatctctgtcacagttactcagctctgctgttgtatcatgaaagcatctatacgcaatacacaaatgaatgagcctggtggctgtgttccaataaaactttatttacaaaccaagcaatgggccaaatttggcccacaggccatggtttgccaacaccagtcttagagcattaaatataaaactctgattaactagatatgtagagttcttccattttagtgactattgagctcagctgctgttgaggcagattaggaagatggacataggaaactggattcagaaaggatgaggactgtttagtcccatgaaagttgcttgttaatgtcctcaggtaagtatgaattgttctggaagctgatagaacaattttcttcagatcaaactgaagtacttactttttccatttctatgcaatcaccaacataatttacttcaatttggaaataaatgtcacagttctcttagttgttaactgtatccttggcttaggttatttgcattttctttctttctttctgtagtgtggtttatacacaaggagaatcacgaacccagacactagtcaatctctctattccctgacttgtactgagattggggaatttgggaggtcagacttacctcaaacgtagaagaaggcagatagagttcttaaccttttccaacttagccacctcaattatttgttcacattttaaggaagtaggaaagagtagtttgaagtcacaaaatttgttctcaggtgttcttaaagctccctgttctcactgcgacagaagactcaggcctactcattttgtgctgtcccacaaaagtgagaggagtacttctctttttttaaatcatcagtaaatttcaattttaaggggcctatgcaaaatgcctcctttctgatgtgattttcttgggttgctggccctagttgaatttatgggccctgaagcctctagtggaaatcttgtcttccctatagaacgagaacagctatgtaatttgcttcaccttctgttaggacttgcaccctctttgccatacagaatgctataaaaaggacagtctgccagtgaccgaagctttctcatttttttttcttccagaacaatagcacacatcttggttaaagctatagtctccttattattcagaaatattctttttcctgctgcaccattaggcaaacatacattatgcttagaatgatacttggaaactccttaacagggcatattgaagtatttgatccagcaacttacctaaaagaatgtttgctcttcacctagggaaataaaacctgaatttcagagccttcaaaatgaaattatccttccaggggaagcacattgccaccaaatacatcactcactacctgttcctggtgactacatagaagatgtgttatttttctgaggtttagaaagtcactgtttacagctatgcaaatattgtactattacagatttttctaatgaagtagtttgaaatcaaggctttagtggaaggtaatcttttcagtttctgacccagatttctttttcaagcaaaactcctctgaaagcctctttgctatagaggtgatgaaggcacttgctagcctaagcagaaacataaagtaaaaaattttgtagtagggaatttttgttggtaagaaatcagtatcatcttgtaacacaaacacgtgttaatagaacttaaaaatactcagcctaattccttgggactttcagtatcttgacatcacttgtattatcatttgaacttggacattgagccctttatttttgggagtttacagttaaattttggaagaattgtgttgtatttctttcttagatgttgtcagtatgaacagaatttttttgtggacagttaatcttgatgtgctccatagctttctccagtttacacttttgcatttctgagattcagggtctttttcaaggaaggaggctaatgtttaaggcctggaggctgaattcagggagcgtattggcaagtttaggcacttacttgtgtcttaatgtgggaaacagaactttctaagtaatctctggagtttgtagcttagaccaggccttcaaaagtcttttctgttttcctttgctacaatttgcttgttatttctctgccggtcacagatgacctggactgactgaatgcttttgtggtaaggaactgatctggccattttcatataacaaaaatcaaagtcaacaattttgtatcaggctgcctaaatgaaccctattgtttccagttcttaaaaatttaagggctatctaagaaaagtttaagcaaaaccctcattccaaacatgcgaccttataataagaacttcctttaaagatgagcagcaaggttgggtatctgatttcactaagtaatattctattgtggtcagaaatgggtaatttgcatcatttggtcactatcaatatttgtgttggagtctgcaagatatttcaacaaagtaagccaaaccactatcttaggggattgttgctggactttggaatataaggctgaacagtgatgtgaagtcatgtttgggggctggaagaagtgataaatgcaaaggttggtgctaaattaggaaccccttgaaggagcaagctgattaaaaaaaaaagctggcagacaagtatatcttttaatttatttgcagtgttgctatattatagagatgatttcctatgggaaaacccatcaaaaagccaaacctttattgttatttttccttaaaaatactgagctataagaagattcagagagtggcattaatttgggcatcagaacattttcttttgtatccctagtgttattgatttgaaagagttaccttttcagacagatggctgaacaaaagtaaatgattaacgggaaatttgatggttgagaaaaaggaacgatatgcctaaagcattttgagaatatacccctcatccatcagccacctctgggtaaagaaacacaaataccaaagcctgagctccttaaccttttgttccagagggcagacatttttaagaaaggtgaatgttagagaaggttacctgatgagcaagcttctttcccataattcagagaactgtgaatgtacttagaaatacactacaggtcttcaccagatgaactagattttataattttaaaatataatactgaaagctagtttgaagtttcagaagccatgaattatggggaaggagtagttttttattttattttatttttctgatctcaagttgtttgtcctgttgtatgttcaatacttggggagataagagcgaggtacagctgtggttttcagaccatattcagtggtgcccctgagggtctcttgtgaacagaagggaaaaagagtgtgatgaaggtgaactctgcctatctgaacctctgtcaacctccagtcagaatatctggcttctagtattgttccttttaactggaagtctctgtggccattaaaaacttgggaacgttggattaaatgaccactttaggactttaaacagtctcaaatatgggaaattttatagccaaccatggctgtgagtccctggcttttgccgtactgagtatgctcacagagatagggagataggtggccagaagacagggtcatttaattttaattgagcataaatcattttgaaagaaaaatgcaaggaattgttgtatgacagccatgcattatagatccttacatgcgacattttcctaaagtggttgagaatgacctgatctttgttcaccgtctcagtgacaaggcgtggagtgactgggctcttcatatgcagtggaatttttgcatctctaggtttgcagaggcaggagttaccgtttttgttcattgacctatcagaaaaaagcaaatcctttggacaatgttgacacagacaggggtacggtctgagactcaagctaacagagctaccccttgctgccttttgcaaaggtgttgtaggtggagaagggtaatggaaacctggtacagcctttagaagttggaagctatggtggtgtatctgtcatgaactgcacacaagggaatgcttaaacaccagctgagtcatatcaggtgccttgtacacacacataaagagtctggtgaattctgacagtgttctgtttgccactagagcaaatttaatagctggggtttcacagcaactgttttagaaaactatatgtgccaaaaatttacattgggcagcagtttatagtgttcttggccaatctgcataaaagccacttgaggaggtttgattaagaaaattgtgtttatctcctgtattacctctgtgtttgatttattctttagtctcaaatttattttctgagtggactgattttctatatgaactgaaatgatgttttaatagaataataggtatttttagaggaaaagtatttttttgtgtaatttgcttacacaactaggacatacttcctatgatactgaatcatcaaattgagtcatttaaagctgaaagaggtgttaggaatgtagtttcacattatttaaatacatgaacagttttctatatattttgtgaaaatcttgatgagacactagaatttctttatggaattgaactttacaagaattttaataaaagaggtggatttcttcagctttctttgtgcttcagtttcatagctgaaaatgctgcttccgtttattaatatggactttgtaaggaaacacaacaacacgttttcttaccttctgtaaattttgtgatagacacatgttatttgtatatatgattgattgtttgcctgttgcaccctaaagttattttcaaaccatgtttattgcaaagagagcctttgggcaagtggaaaatgccctgatgctagaatgaggtagttccataagctagttaggagcttgctacctcttcttggtacctgaaatattctgaaaggatatcggagaggtcctatgcacccctgtctttcaaaacccacctccagcacttcaaagtagtgtctctggagagtttaaaataaaagaatgaatgctattcagtggattccctcattgaggctcccatctttcctgccaggtgcagctttttctggttggaatcatctcttctttacggattgccgcattgtctctttgtgaatgaggcaggctgaactgtagagcatgaaactcattagaagtttataaagtaaagacctgtaaagcatgtgggtggaatgtttccatgctcttgaggtgaatattaaatttaaattctggcctttgggaactctttgcttgtgagctgaagaaggaaagaaggagttgggggtgtatatctaactgtgtttttctatatggaaatatatgagcatcaagtgataacttcaataaggcctcaggattgtatttaaaatacctgttttgtgggacagcatgcctttgttttctttgcctgttggctttggtggctccaaacattttcattttaggctagctttcctgtcacccaggttgtgtgcattttttttttcatttgaactattgtttatcattattaatgatgttatctccaaatcccaaagccaaggaaatagccagtatgcaggacttgcagtagatataagcattggtgttaacataggttaagttttgttagtgttcccagaaatatactgaattgagggataatgtagctttaaagaaattatgtttctttttaacatttggagaagccacctgtcctgggtccctattcttgagaaattcatcttttcatgcaaataacattgatgggggacaagactggatgattgacttctatcagtcagtagacaaggaagtataataattgccaaaggtgagggtaattttgccttacaagtatgtaggtcattctgtggtgggatttcccatcacatctagtaaaaaacaaccttttcatttccctcctttctaatccaagatcatatttttaaaaagtaggtttctgatgtgccatgaaatatttctgtgaatctgtgtttttgaccaaggaaacagctgagatattaaaccatgtggttgttccacggttcatctggctaccgttctgggtcccctctgaccacctcaaaaagaaaatgaaattgggagattaaatcaagcttgacctcctcttttaatgaggaactttcacgttgacttcctatctcaggatattcttcagtttcatactgctgaggagaaaggaacaagctgcagacactgtaactggtctccagatgtgtgtatatgcgtgtaaaacttcacaccgtgtgtgttgtgttcaatgttgtgtcaatctacaaactgactcaaacaacagtttaacgatagagaagacagtgataatggcaaaaaaaacacccaaccacctttttccgtcaaagtgcttgctatggctttcatagctgggacaagtaacattaagtattcaggagcaaagtgttcttgaaagaaaatggtgtgttgatctcataagaaaatgtacaaccaataaaagacattttaaaaagcgtagtgagtctgtacattaattgagttgttggaaaccctatattccaggaacatggtataaaaggctctcccggtaaaagctttcctggactatatattcttgttattctttctctatgcttttcctatttctaccaccgcacttcccaaacagactagaacaaaacctaacaacacaacagtattgcagtcgtattagtctgttt

SEQ ID NO: 272 - DNA, 3610 bp, Homo sapiens
tcagttccaagtttggagcttttagctgccagccctggcccatcatgtagctgcagcacagccttccctaacgttgcaactgggggaaaaatcactttccagtctgttttgcaaggtgtgcatttccatcttgattccctgaaagtccatctgctgcatcggtcaagagaaactccacttgcatgaagattgcacgcctgcagcttgcatctttgttgcaaaactagctacagaagagaagcaaggcaaagtcttttgtgctcccctcccccatcaaaggaaaggggaaaatgtctcagtcgaaaggcaagaagcgaaaccctggccttaaaattccaaaagaagcatttgaacaacctcagaccagttccacaccacctagagatttagactccaaggcttgcatttctattggaaatcagaactttgaggtgaaggcagatgacctggagcctataatggaactgggacgaggtgcgtacggggtggtggagaagatgcggcacgtgcccagcgggcagatcatggcagtgaagcggatccgagccacagtaaatagccaggaacagaaacggctactgatggatttggatatttccatgaggacggtggactgtccattcactgtcaccttttatggcgcactgtttcgggagggtgatgtgtggatctgcatggagctcatggatacatcactagataaattctacaaacaagttattgataaaggccagacaattccagaggacatcttagggaaaatagcagtttctattgtaaaagcattagaacatttacatagtaagctgtctgtcattcacagagacgtcaagccttctaatgtactcatcaatgctctcggtcaagtgaagatgtgcgattttggaatcagtggctacttggtggactctgttgctaaaacaattgatgcaggttgcaaaccatacatggcccctgaaagaataaacccagagctcaaccagaagggatacagtgtgaagtctgacatttggagtctgggcatcacgatgattgagttggccatccttcgatttccctatgattcatggggaactccatttcagcagctcaaacaggtggtagaggagccatcgccacaactcccagcagacaagttctctgcagagtttgttgactttacctcacagtgcttaaagaagaattccaaagaacggcctacatacccagagctaatgcaacatccatttttcaccctacatgaatccaaaggaacagatgtggcatcttttgtaaaactgattcttggagactaaaaagcagtggacttaatcggttgaccctactgtggattggtgggtttcggggtgaagcaagttcactacagcatcaatagaaagtcatctttgagataatttaaccctgcctctcagagggttttctctcccaattttctttttactccccctcttaagggggccttggaatctatagtatagaatgaactgtctagatggatgaattatgataaaggcttaggacttcaaaaggtgattaaatatttaatgatgtgtcatatgagtcctcaagcttctcagacttctcttattctttacaaaatgaatgcattggccctgacaaaaaggtgctacggtagtgatgaaattataagtagatttgtagtttgtcccatttattattttaatatttatgtttaagtgcttggttgaaaagattccattttatacaagaagggagattcaaaaaaaaaatataaggttgggttagcaatatttatagggcttttattttttaagttcaattgtgtctgtggtccagaagaaattatttaatatgcatctttgagaatattataaaaatatcaaaaaggagctcttcttgtgaaatgtctgttccagctgttgtgactgctgccatttttgcaaacatctgcccaatcctgggtgatcaccacatcttttaggggaagtgacaagatgctctggtcatactctttttcccaactttggaaaacataaaaatcactcatataacagctcaaagagtaaaacatttggttcttctgacacttgtggtatagtattagtggaaagtgatttgtaatatgattttatatccacctacctattcatctacctgtgtgtatgtgtgtgtttgtgtgtctatttggcaattcacaagtcctgccaagtggtttctatgagcatctctgtttggtaaggaggacaattgtcagttttgagggggacatgtgttaaatcacagaaaaaaatggtgccttcttctgcgtttgtccctcctgccatgtgtaagttgtaaggattgcctttgtagttaatgtactctttggctttgtttgtttgttttcttcttcagtgaagcagccttactattcatagaagggctagaataggagaaaatgaaaggtagtgagtaattctttgataagatgaggaaataatgggaaaggttgaattaattcctgggcatggactaccagatgaccacaagttgcgttgaggccgcatctttcttcagcagcgtgcaatagctggctcctctataggagatgagcttcattgggagttcctagcaagttgactaaacagcaaaagttctttctcgtgggtaaatatacccacaggttctatgatttgtagctctaggtttcttgatgatcaaggagtgaagtaattgacagggaaaatatagacctatgataaataaccaggaagcattgcttttggacaaggaaggacagagggttttgattttaaaaagaagaaaaaaaaaccttattttttctttcttggcctcaagttcaatatggagaggattgcttccctgaatcctctcttccttccccttttagattttgaagtgcaatcatatgtttttctctgtttgcattttttcctccttgttcttgacaaggaggagttgctcctgcccagaatgagcgtgacacttccgaacacttcttcatattcagttccaagatatatctgcttgattaaacatgagcttcctctgctctgaagctacctctgtcctcattttattctagccagaaaaggagtatcaccctagtgattatggctgttcactttcccatctatcttcctaaatctggaagttcttctcttggagatcaagagaaaaattacaattgtattccttactttattcacccacctatgaaaacaggaagcaataggaaaaaaaatccggttactccattttagcttttggtgaacgatgtagagcaaattgtctctctggtctaggtccgattactcttacctgtttttccactttgagacattctaaacagaatgtgtaacttctcatatgtatgcctctcccatctgtgaacctaggccaaagttgcaaaaacaatcatattaatagtagagtagagaaaaagttagtctatggttctcaaccctcgtgtacattggaaccatctgggagctgtgaacactgtcgctgccaatgttccagccaccagagatttggatttaactggtggggcctaggaattggtgtttttttgttttgttttgttttttacacaccttcatgtgattctgatgtgaagctgggttca

SEQ ID NO: 273 - protein, 334 aa, Homo sapiens
MSQSKGKKRNPGLKIPKEAFEQPQTSSTPPRDLDSKACISIGNQNFEVKADDLEPIMELGRGAYGVVEKMRHVPSGQIMAVKRIRATVNSQEQKRLLMDLDISMRTVDCPFTVTFYGALFREGDVWICMELMDTSLDKFYKQVIDKGQTIPEDILGKIAVSIVKALEHLHSKLSVIHRDVKPSNVLINALGQVKMCDFGISGYLVDSVAKTIDAGCKPYMAPERINPELNQKGYSVKSDIWSLGITMIELAILRFPYDSWGTPFQQLKQVVEEPSPQLPADKFSAEFVDFTSQCLKKNSKERPTYPELMQHPFFTLHESKGTDVASFVKLILGD

SEQ ID NO: 274 - DNA, 3550 bp, Homo sapiens
gcagagtgttgctgtgtgtgcttgtgatttgtattttatttgatgtaaacgtgaaggcagagtattttctaacactgtaattcaactaggttttgtgtctcctggatctatttttttttcttgttgttctgaggagctgatatacttggaaatattaggtttaagatatgcagatgtccaacttatatacatagtcaagggtttagagtctggagacaggaggctggcaatttcaactaggaggcagcaagaagcgaaaccctggccttaaaattccaaaagaagcatttgaacaacctcagaccagttccacaccacctagagatttagactccaaggcttgcatttctattggaaatcagaactttgaggtgaaggcagatgacctggagcctataatggaactgggacgaggtgcgtacggggtggtggagaagatgcggcacgtgcccagcgggcagatcatggcagtgaagcggatccgagccacagtaaatagccaggaacagaaacggctactgatggatttggatatttccatgaggacggtggactgtccattcactgtcaccttttatggcgcactgtttcgggagggtgatgtgtggatctgcatggagctcatggatacatcactagataaattctacaaacaagttattgataaaggccagacaattccagaggacatcttagggaaaatagcagtttctattgtaaaagcattagaacatttacatagtaagctgtctgtcattcacagagacgtcaagccttctaatgtactcatcaatgctctcggtcaagtgaagatgtgcgattttggaatcagtggctacttggtggactctgttgctaaaacaattgatgcaggttgcaaaccatacatggcccctgaaagaataaacccagagctcaaccagaagggatacagtgtgaagtctgacatttggagtctgggcatcacgatgattgagttggccatccttcgatttccctatgattcatggggaactccatttcagcagctcaaacaggtggtagaggagccatcgccacaactcccagcagacaagttctctgcagagtttgttgactttacctcacagtgcttaaagaagaattccaaagaacggcctacatacccagagctaatgcaacatccatttttcaccctacatgaatccaaaggaacagatgtggcatcttttgtaaaactgattcttggagactaaaaagcagtggacttaatcggttgaccctactgtggattggtgggtttcggggtgaagcaagttcactacagcatcaatagaaagtcatctttgagataatttaaccctgcctctcagagggttttctctcccaattttctttttactccccctcttaagggggccttggaatctatagtatagaatgaactgtctagatggatgaattatgataaaggcttaggacttcaaaaggtgattaaatatttaatgatgtgtcatatgagtcctcaagcttctcagacttctcttattctttacaaaatgaatgcattggccctgacaaaaaggtgctacggtagtgatgaaattataagtagatttgtagtttgtcccatttattattttaatatttatgtttaagtgcttggttgaaaagattccattttatacaagaagggagattcaaaaaaaaaatataaggttgggttagcaatatttatagggcttttattttttaagttcaattgtgtctgtggtccagaagaaattatttaatatgcatctttgagaatattataaaaatatcaaaaaggagctcttcttgtgaaatgtctgttccagctgttgtgactgctgccatttttgcaaacatctgcccaatcctgggtgatcaccacatcttttaggggaagtgacaagatgctctggtcatactctttttcccaactttggaaaacataaaaatcactcatataacagctcaaagagtaaaacatttggttcttctgacacttgtggtatagtattagtggaaagtgatttgtaatatgattttatatccacctacctattcatctacctgtgtgtatgtgtgtgtttgtgtgtctatttggcaattcacaagtcctgccaagtggtttctatgagcatctctgtttggtaaggaggacaattgtcagttttgagggggacatgtgttaaatcacagaaaaaaatggtgccttcttctgcgtttgtccctcctgccatgtgtaagttgtaaggattgcctttgtagttaatgtactctttggctttgtttgtttgttttcttcttcagtgaagcagccttactattcatagaagggctagaataggagaaaatgaaaggtagtgagtaattctttgataagatgaggaaataatgggaaaggttgaattaattcctgggcatggactaccagatgaccacaagttgcgttgaggccgcatctttcttcagcagcgtgcaatagctggctcctctataggagatgagcttcattgggagttcctagcaagttgactaaacagcaaaagttctttctcgtgggtaaatatacccacaggttctatgatttgtagctctaggtttcttgatgatcaaggagtgaagtaattgacagggaaaatatagacctatgataaataaccaggaagcattgcttttggacaaggaaggacagagggttttgattttaaaaagaagaaaaaaaaaccttattttttctttcttggcctcaagttcaatatggagaggattgcttccctgaatcctctcttccttccccttttagattttgaagtgcaatcatatgtttttctctgtttgcattttttcctccttgttcttgacaaggaggagttgctcctgcccagaatgagcgtgacacttccgaacacttcttcatattcagttccaagatatatctgcttgattaaacatgagcttcctctgctctgaagctacctctgtcctcattttattctagccagaaaaggagtatcaccctagtgattatggctgttcactttcccatctatcttcctaaatctggaagttcttctcttggagatcaagagaaaaattacaattgtattccttactttattcacccacctatgaaaacaggaagcaataggaaaaaaaatccggttactccattttagcttttggtgaacgatgtagagcaaattgtctctctggtctaggtccgattactcttacctgtttttccactttgagacattctaaacagaatgtgtaacttctcatatgtatgcctctcccatctgtgaacctaggccaaagttgcaaaaacaatcatattaatagtagagtagagaaaaagttagtctatggttctcaaccctcgtgtacattggaaccatctgggagctgtgaacactgtcgctgccaatgttccagccaccagagatttggatttaactggtggggcctaggaattggtgtttttttgttttgttttgttttttacacaccttcatgtgattctgatgtgaagctgggttca

SEQ ID NO: 275 - protein, 278 aa, Homo sapiens
MELGRGAYGVVEKMRHVPSGQIMAVKRIRATVNSQEQKRLLMDLDISMRTVDCPFTVTFYGALFREGDVWICMELMDTSLDKFYKQVIDKGQTIPEDILGKIAVSIVKALEHLHSKLSVIHRDVKPSNVLINALGQVKMCDFGISGYLVDSVAKTIDAGCKPYMAPERINPELNQKGYSVKSDIWSLGITMIELAILRFPYDSWGTPFQQLKQVVEEPSPQLPADKFSAEFVDFTSQCLKKNSKERPTYPELMQHPFFTLHESKGTDVASFVKLILGD

SEQ ID NO: 276 - DNA, 3700 bp, Homo sapiens
tctttggagctaagtgaagaatgacttctgttaggttttcctctgctggtcttccttgcagcctcgaaaacctcaccagagtcgcctctgctggtctcttactgtgctgctctgtcagagatgggcaagtaagcgaactgcagagtgttgctgtgtgtgcttgtgatttgtattttatttgatgtaaacgtgaaggcagagtattttctaacactgtaattcaactaggttttgtgtctcctggatctatttttttttcttgttgttctgaggagctgatatacttggaaatattaggtttaagatatgcagatgtccaacttatatacatagtcaagggtttagagtctggagacaggaggctggcaatttcaactaggaggcagtaaattcagggcaagaagcgaaaccctggccttaaaattccaaaagaagcatttgaacaacctcagaccagttccacaccacctagagatttagactccaaggcttgcatttctattggaaatcagaactttgaggtgaaggcagatgacctggagcctataatggaactgggacgaggtgcgtacggggtggtggagaagatgcggcacgtgcccagcgggcagatcatggcagtgaagcggatccgagccacagtaaatagccaggaacagaaacggctactgatggatttggatatttccatgaggacggtggactgtccattcactgtcaccttttatggcgcactgtttcgggagggtgatgtgtggatctgcatggagctcatggatacatcactagataaattctacaaacaagttattgataaaggccagacaattccagaggacatcttagggaaaatagcagtttctattgtaaaagcattagaacatttacatagtaagctgtctgtcattcacagagacgtcaagccttctaatgtactcatcaatgctctcggtcaagtgaagatgtgcgattttggaatcagtggctacttggtggactctgttgctaaaacaattgatgcaggttgcaaaccatacatggcccctgaaagaataaacccagagctcaaccagaagggatacagtgtgaagtctgacatttggagtctgggcatcacgatgattgagttggccatccttcgatttccctatgattcatggggaactccatttcagcagctcaaacaggtggtagaggagccatcgccacaactcccagcagacaagttctctgcagagtttgttgactttacctcacagtgcttaaagaagaattccaaagaacggcctacatacccagagctaatgcaacatccatttttcaccctacatgaatccaaaggaacagatgtggcatcttttgtaaaactgattcttggagactaaaaagcagtggacttaatcggttgaccctactgtggattggtgggtttcggggtgaagcaagttcactacagcatcaatagaaagtcatctttgagataatttaaccctgcctctcagagggttttctctcccaattttctttttactccccctcttaagggggccttggaatctatagtatagaatgaactgtctagatggatgaattatgataaaggcttaggacttcaaaaggtgattaaatatttaatgatgtgtcatatgagtcctcaagcttctcagacttctcttattctttacaaaatgaatgcattggccctgacaaaaaggtgctacggtagtgatgaaattataagtagatttgtagtttgtcccatttattattttaatatttatgtttaagtgcttggttgaaaagattccattttatacaagaagggagattcaaaaaaaaaatataaggttgggttagcaatatttatagggcttttattttttaagttcaattgtgtctgtggtccagaagaaattatttaatatgcatctttgagaatattataaaaatatcaaaaaggagctcttcttgtgaaatgtctgttccagctgttgtgactgctgccatttttgcaaacatctgcccaatcctgggtgatcaccacatcttttaggggaagtgacaagatgctctggtcatactctttttcccaactttggaaaacataaaaatcactcatataacagctcaaagagtaaaacatttggttcttctgacacttgtggtatagtattagtggaaagtgatttgtaatatgattttatatccacctacctattcatctacctgtgtgtatgtgtgtgtttgtgtgtctatttggcaattcacaagtcctgccaagtggtttctatgagcatctctgtttggtaaggaggacaattgtcagttttgagggggacatgtgttaaatcacagaaaaaaatggtgccttcttctgcgtttgtccctcctgccatgtgtaagttgtaaggattgcctttgtagttaatgtactctttggctttgtttgtttgttttcttcttcagtgaagcagccttactattcatagaagggctagaataggagaaaatgaaaggtagtgagtaattctttgataagatgaggaaataatgggaaaggttgaattaattcctgggcatggactaccagatgaccacaagttgcgttgaggccgcatctttcttcagcagcgtgcaatagctggctcctctataggagatgagcttcattgggagttcctagcaagttgactaaacagcaaaagttctttctcgtgggtaaatatacccacaggttctatgatttgtagctctaggtttcttgatgatcaaggagtgaagtaattgacagggaaaatatagacctatgataaataaccaggaagcattgcttttggacaaggaaggacagagggttttgattttaaaaagaagaaaaaaaaaccttattttttctttcttggcctcaagttcaatatggagaggattgcttccctgaatcctctcttccttccccttttagattttgaagtgcaatcatatgtttttctctgtttgcattttttcctccttgttcttgacaaggaggagttgctcctgcccagaatgagcgtgacacttccgaacacttcttcatattcagttccaagatatatctgcttgattaaacatgagcttcctctgctctgaagctacctctgtcctcattttattctagccagaaaaggagtatcaccctagtgattatggctgttcactttcccatctatcttcctaaatctggaagttcttctcttggagatcaagagaaaaattacaattgtattccttactttattcacccacctatgaaaacaggaagcaataggaaaaaaaatccggttactccattttagcttttggtgaacgatgtagagcaaattgtctctctggtctaggtccgattactcttacctgtttttccactttgagacattctaaacagaatgtgtaacttctcatatgtatgcctctcccatctgtgaacctaggccaaagttgcaaaaacaatcatattaatagtagagtagagaaaaagttagtctatggttctcaaccctcgtgtacattggaaccatctgggagctgtgaacactgtcgctgccaatgttccagccaccagagatttggatttaactggtggggcctaggaattggtgtttttttgttttgttttgttttttacacaccttcatgtgattctgatgtgaagctgggttca

SEQ ID NO: 277 - protein, 278 aa, Homo sapiens; identical to SEQ ID NO: 275

SEQ ID NO: 278 - DNA, 71277 bp, Mus musculus
aagttcacactaccgatttgcacacgcacaatgctttagtaaatagacctttactgtctatatttgtgaccgttcttaagtccaaagggatttttttcttttcttccttcctttcttcccttttaagtcaaggtttctctgtgtaactctggctttcctagaactctgtagacaaggctggccttgaatttagagatctgcctgcctctgcctccaaagtgctgggattaaaggcttgcaaaatcacctccaggcttccaaaggtttttttttttctctctctctcttaaagatgacacctccaagaatctcaggaaagggaaagagaatgggtgaggctagggacctcaccatcagctctaaattctaagcaagagcacattctatatggctctcatgtccaggcatatgatacttgcctctctcccttcattttagtgcccctgggaaaagatcatctgtagaccaagatctccagcacacaacatgaggaaagaccaatcttatatttatgatcctaagtcaccaaagttgttgaatttgaaacatactagagtgtatctttgaaatgttcctgcttagggaaatgaagaagcagggcctatggagacagcttcaaagcttggccaacgaaacatgtgaggctgtataggaatgaatcgtgtacatgtccttctttccagtaagcagacttaccaatggctgtgtgcaaagcaatgggggcagttttgttcttatttccatacctttagattctgatgcaaggcccagaagatagcaggttcttggtaaatattggttggctgaatatcaaagttcctcagtgactgagatgagcaccatgcccggggcatctggcaccaaggcagtgagtgaactgtgggcagcagatggtaaaggagcttcatggaaagatgattaattgaggtatttatgtgttaacctactgcactgtggcactctgaaagcctgtgggagactgccaatctcctttttgagttgcccttttaagcattgtaatctcaatttgacatcattaggctcctgagctctctcatgttgattctgtgatggttttctagagaaaatattcaaatggaatcagacacgaatattggcttacttttaggaagatcacaatacattcttctccaccaacaaatcctggctttcctaagtggccagtatttcctttccagaaagcaaatggagttctaggctcatgtttacagacagtgttcctgtgctgtgcagtaattgcaggcagctaccatcttcccaaattttacaggtgagatttttatgtaaatgaaaatgcaagtgcttaaatgataacttagttttattctcatttagagaaaatcctcatagatataggggtgttcacaaaacacaccatagaaataaaatgtcctgtattgctcaggaccaaagcggatactgggacattgggttgtcagtttaaaaatcggggaattgtttgctagaccagaatatatcagtgacctcagagtacagatgatgccgtatatcaaataaaagaaccaaattatctcctctttgcagctgatagccagacagtagagaaataagaaatgttactaatttaaaagaatggagggtaatcttgccgctggatcagccttggcttagagaggggttctgagagaaggggtgtctgggagcagcaaaaagaacagctggaagcttggatctaagctgatggcctaggctctgctgagatggctttacagactgctctctgtctttgtctgtatgtctgtctgtctgggtgtctgtgtctgtgtctctctgtctctgtctgtctgtctgtctgtctgtctctctctctctctctctctctctctctctctctctctctttctctctctgtgtgtgtgtgtgtgtgtgtgtgtgatctgctctgctctagacagctttcttgctactctaaaagtgccctggctgagatagctctctctactagtagaaattccaaaagctatctggatagctcatgacatttctgaccagctgtaaaaaaaaataaaaataaaaataaaattactggatcttctgacaagagctgtgttgctctccaaagatctccagacagttctgatctccctagagaaaaattctaaagaactgctatctcttcttgatagctcatttcatgcaaaccaaaagcccaggttttgtttttgtttttgtttgttttaatttattccaggtttccctctgattatcttatgaatcaccatcctatggccctagccctttgattcttaaggtacaccaagcctttcagagagatctgtctgcctttgttaagcacacaggataaactagttgggtgagaccctgccctgaaattaccatttctaccacaccttggcctaacctcagctccatcctaggctgactttgcgctcaggaatctgcctgcctttgtatctgcccgcttttgtatttttctgacaagctggctaatagtatatctatttctgttctttaagatttgggaaacctctcataattcatactgcatccttatattttgcatagttgagaaactgtatatagtttgaactcatgtacttagagctctttcccatagccatagaccttcggtcctaaaggttctagtgtttgctatcagtgtttgtggtgagattagccatagcttcacctcctggactcatgtggtctgattatcatgaagtcattagcattaacagagaggacattccttggagaaatgtgaaaatatatactttattacacaaacaagccttaggttcacagaagccatcaacatctcctggaggctcacaccagggtcctgtcccaggggcaggaaccatgtcactctgtccctaccagggtcacgctgggcttggcatcttgcaaacaaaaagccacatttacatatccacaaatatccatatatgtatccatatgcatgtattatgtatctttaaagaaatactaaatgagaggtaagggattatttgtctactaatatggaacaacatttaataactacctagatgataggtgccctgttcaaaacgttagttctgctaactattagcagatatactattagccaacttctgttgtcgtgtggttctcggatacataactgcagacattgacatttaatacctctactgcccctcaagtgttagggctgctatcaatcaagcagaacgtaaacttccttttgtagcaagaagcagctgcctgccatggtaggaggaaaataccagcaatgccaagggcctgcagctgttctcttagtagttataaacagtacaaaacagccagtatttgtctcacattgtaattatttgtaaaaagcactgtgatgggggaaagatgctacataccacctaagtcatgtaccaggccttcttcctgccatccactctacccaatttgggttgccttttgacccgttggaaagctgaattggagctattcaaagttgcaggttttgtgtctggagagagagatctcacatcaccttggagacaagatgcgccctcatttgagaaaaaccaccaccagagacccctgaataacatgagagaaaagaaatctccctttgtgtttctgagtggggtagaggaggagttaaagctattactaaaccaaatgtaaatgccaactctgtttggtggcacagcataggcaagccgaatggggttctctgtgccatagacttcttgggtcccaatggaggtgtaagaaaagccagttcgaatcccgtgtggctcagacagacctcaggtctccctggcttaattctctgtgcagcaacgtttttggagaaaggttgtggaggtgtgacaacgatatgaaaaacccaggccactggtactgtaggggtgggaggtcctgttcaaggaatcaggagttacagtgctgggtggttgttctgcggggagaatgtctcttttgggctccatcctttaaagcaggcattactctgaaacaaacaaacaaacaaacaagacaaaaatgcaagtgtactagtagattattggtcctccatcaccctgaggtctgttcactgtgtaatgactttctccaacttatagggctttgatgatgactaatcaaaccaaagataactattaacaaaggtaaaacccgatgtagaatgtttgataacaacagtgttatttcatgttaagtggacttccccatgatggtgagtgtaatttctcctgggacattccattctctcaggaaagcccctcctcctgctatccctcatccaggttgcctgtgcatgtgcctttgctcccaattcaattttggcttcatacagagtacatttctttaaatgatcaaaacaaagctcagacctttcttttgggaagagttccaaaactacattcagcagacaagtgcaaggtggctaaggcactgtgcattgcctagaacctgaaccaaggtgtccctttaggctttagaagaagcagaagtgactctcagagaggtggcttcctgtgcaggaagtgccaatggatggagtcacctgacctggaacaccgaggggctatcccactctcccccaccttgcggcttccgtggtcagtttgacaggatgataaagatctagagactgtggctagacactgcagggggcagagctggtgaggctcttgggtgtttcttcaggccaagagagctggaggggcatgctgagccctgcgtgaccctggtggggacagagtgacatggttcttgtccctgggaaagggctctggtgtgagatgtcgatggctgctgcaggcagaattcttgttagtggaatgatgcacatatcttcacattccttcaaggaatgttctccctgttaaggttaaagacaccatgataatctgagacaacatgaatccaggaggtgaaggtgtggctaatgtcacagcaaaacgggacttcaggacagcccttaaggctatgagaaaaagcactagatacatgagttcaaaatatagaatatctcaactatgcaaaatggaaggatgtaatatgaattatgaggactcatgaatctaaagagccagctactctatgagccagcttgtcagaaagatacaaaggcaggcagatgtctaaattcttttgcaatgttaagataaaaaggcatgcttgctctctcttaaggatcaaaaggagatgctatggtcaggagatgctgattcataagataatcaaagggaaacctggagtaaatgactggattgatatgtaaaataaaggactggacctgtattctgcaggagatgagcaatccaggaattttttaggataaaaagagagaacttcctggagagcagacagagacacagaggcagatagacagacacacacatgcacacgcacactcacatgcaagcaggacgcagacagagagatctcttagaatagcaagcaagcagaaaacagacagagagatctccagagaaagcagaacatagagagatgcagactggaaaagctggatcaagcagaatgcagctcatcagcttggatccatgatttgactttgagtcgttcttttttgcagctcctagacatcccttctctcagaactcttctccataccaaggctagaccctggcagtggtggcagaggaggaggtgtgtaatagagcaaggctctagttggatcttacatcagtcctgtctgtcaaataccaagataaagtggttcagattttgctagttgtttgggaatagagttaccaaccataaaaaggtttcacctaaacattttagagggacaaattcattgttatagtctccttctcaacaggcatagagaggtatttaggttaaaccatgccaagcaaggaaaataacaactaaacaatatccatgaggaagtggctatgccaggcaaggtgtcttacccaaagctcaggcaacagaatatcaaggagaggaaccctagaaaacactgaggtctgactagtcagcaacatatggaggagtggagcccagcagtgcaggaaagcaccattgcaagattagtgctctcctccctagtcctccgtcctctcttccttacctttctatcccctttctctgctttccctctccttacaacccctctcccttgctctattaaagtcagtttgtatctttttttttaaggggagtcaataggtgtttggtcactcctaattacaagaaccatcacacatacaaatgatattgctttagaaaaaaaagagttgagtgtgacaatgcacacacattgtcctagcacctgggaggcagaagcaggaaattgttgagtttggggatagccttgggtatagagaatcatctacatcacaagaccatccctcaaataaagagaaagtgaaaaggaagaggaggaaggggagggaggaggaaggtagggagtgcagagttgcattggccatagtgtcttacacagcaatagaaaagtatctaagagagaaatttaacaatatcctggttgtgtttttttccttatctaacatataaaggttctcggattgggaattgctttatatgctggatgtcacatagaacaacttttcttgagggtggcagtataactcagtgctggagtatgtttgaggccctggcttctatcatcaacaccaaaacaaataaataagtaaacaaataactggccttttggcaagggctggctgtgctgacagtacctggcaaatagtcttcaacttgtgtgtgtgtgtgtgtgtgtgtgtgtgtgtgtgtgtgtgtgtgtgtgtgtgtgtgtgttttaaaaaggaccattttccacccaccattaggaactcaaggttctgtctttacatgatattgatttagaatcttctcactatttcctctggatgccctgcctgctcacctgggaaccagtcgtatggtccttctctgaaacacactgcacatacctgaagctctgagatctgagctctccaagactcttgtcagaaagaaggaaacatatttagaaggctgattgagggctgggaacaggtggccttccttctgaaggatgaggtcattctccacagaggccaaccacacggccaggctattggggagattccgaggccttaagtagtcatctgagcctccttcttctggacagagccacagaaacaaagaaaacaatctgtgcttctacttttgaattctgggctttgccttgtgtcttcttcctgcactccagtgtctgcctttcttttcctttcagtcgtgctttggccgaggcatatgacatacaactactcatttgggctgtgggtttaagttctaagatgaagctagggagtgagaggagacaaagactcttgttaagaaagtctcgcaatcaatcaagcaatagcaactgatcagtcagcccatcacccaccggactctcgacttctgatgctctttttttccctcctcttctcaaaaacgaaacctgaggatttgagatgagtatgctagaaagagcagagtcaaatgcaggcaggaatgctaactctgactgtcaggggacaggaatgaggaattcgtcatctaaagtataatagtaataatattaacaataacagcaacagaagcataggcacagagagaagtattccaaatagatggcagatgaaaaaacatgatttgcgcttgtgatttacgggtgtagaccaacctataaacaaattgtgcttggagaagtccacctttctattgaaaacaacagcctaaagagaaggaagaggaataaacactggccagttgcttttaaacacatcatctagtgatcgtgtaaggaggcaaatgctgagaaagtgactcatctggtccatgatctttctaggagttggggatagaagctgaccatgggatttccctactagagtcccttaactatgctgattctaagcagcaggcataattgcataatgacactatggtacagaggggagggggtaggtttcccatgtgattaggaggaagaggatgagagggtgatagtgcaggaccagtcctgtaaagaggaggagcagaagtagaccagaatctcatcccccagggaggaaacaatgcaagtgcacactgagggagggaagggaaggtggggggagtgccttgtattgcccaggacacgagtgtacagggagagcaaccatactagacagagtcaagctcttcccaaatatttattagcactctaaatttttaaatacttttcttcacattttttgtttactatttatttttatttatctattagggtgtgtgtgtgtgtgcactcataactatggtcagaggacaacttacaaaacttggttctctctttccactgtgtggttgtcagggacaaaattcaggtcatctggcttggcagtgagtaactttcccagctaggccagctcaacagcagttctttttttctggctggcttgcttgtttgtttgtttgtttgtttttagaacctccccactggtttctcagccaagatccccattaattattttggcatatgtttagtctatgttatgctagcttctgccccagaagacatatgactaagtagtgaataagacagaaagacctctttcaggaagttattagcttatgagataggtcaatattaagcaattaagtataatttctgatcctaagtgtatgaaaaaaatatgacacagtaatgtcataggtacctggagtatatcttataaactggatgctttagttgagagaagaatctatggggagatgacctttgtactaagacctcaaaaaagctatgcaaagaattgggcgttgagatgtcagtaacacaggaccctgtgtaagatcaagcctaggatgtctaagaaaaaacagagcagcccctggggctgattccaggaagggggagggtgatctaaggccagcagaattgggcttgaaacatggcattatcttcattcaacaagtactggcatctactgggtgtagggcgttgtcaagaatacaaaatggaaatgagaaacctttagttcagtggttctcaatcttcctaatgctgtgactctttaatatggctactcataacttggtgacccccaaccataaaattattttcataactgtaattattttcataactgtaattttgctactgttttaaatagtaatgttaagtatctgtgttttctgagggtcttgggttacccaagtgaaagggatgttcaaacccccaggtcttagtgcctataaaggaaattaaaattttaccaaggataagccaggcacggtggtgcacacctttaatcccaggtgcacacctttaatcccagcactcgggaggcagaggcaggtggatttctgagttcgaggccagcctggtctacaaagtgagttccaggacagccagggccagggctacacagatgtctcggggaaaaaaaaattaccaaggatgatagatggcccacatgctagaatgcatgcacacgctagacaaaaccgcagtgcaggtacgtgggggctttctgggggtagtcattgcaacacactgccctgaaaaagaccatttagagacagttgggttcctctcctcgaccagggtcacgtctctgcagaggtgagtcacctagcccacctttcccagagcatgctccttctcggtctgagttgggtggggcagggcccacaggaatcccccgccttgttggctcagaaaacccagacaggggagcccctctaacaggggagtcaaggcctgagacactgcccgtaactggcaccagggagccccaggggaaaccgcctttagggacttggggacccccctaccgctgcgcctgcctccgtccaccccaccccccacccggcgcgcgtgcgcaaactgcagggttgtaggctggggctcatgcgcgagcacgagcgcgtgcgcgctgggcgtccggccgcgggggcgagggccgctgtccccgacgtccgcacggccggacagtaatgccgcgtcccgggtggagcgcgcagcgagcgccgccctggcgccgcctcccgctgccccgcccgcctgcccgcccggctgcgcgcccggtctcctcccgcgagcgcggagcggcgagcccggcgcggccatggggagtgggatgagccaggtaacgtccggtcccggccgcaccctcttttctgcagcctccgcagccctgacccgcacagcgtgcccctttgagagcgggggacccatgctggagctggtctgtctccctcccctgagaccgggccccttgacgtctgccacccacagcattggtgaaccgggccagatgggcggcttctgtaatttcctcttttccccagatttgtgtgcgcgtgcacagataagccactctggtgggggaagttcacggaaaccctagaactgacatggctttcggtgtctggagctggttgaccctgggttgtggggcttccttagggcaacctgttggctggctgttgtggccgcaaggccttctagaaactctttctttgcccctgtggtggcccaaaccttctgggccggttttctcacccctaccccctagattgaggatgatctggcggtgacagtcctccgggttctatttgtgtcagtctcaaggttaaggaacttgctggttcaaagagaaatcttactaaggctctggatgcccaggactaagacaagtacttctacaagtattttaaatggtcctgggtttggttagcttctggtgttaccccccatcttgtctccacttactttatccatcatgtttataggttctaacggtgtggctcgctttctccccttctttcttcaccctttcacatttgtctctgctttgtggcgaggggctctgcagtggtttagttacttccatgggaatgattattgaggcagagatccaagaccgaggagggaacgaacatgtctttgatggaagcctgcatgctccttgcacagtctccatgtttttgtgcgttgtgacttttgtgtgttggtgactaggattttattattttattattattattatattattattattattattattattttcgccagtgatcaaatttgaaacaaactccctctcatgaatatatgcttgtattatgttcccattagcacagggatcagtcatcgctctgagctttctgcttttaaaattagaccggttgaagatgtccgcctggggctgacagactctgcttgctttcccttgacatttctagttggcgccactgtttactgtccctttctgcatttggtttctagtattttatattctaattgaaagaatgggtttaggtatacaagtgattgattgcctaagggatattcttttcatacttctcagcgaaggtggcagtattcatatccacattgtgctatttacttcttatagtagattccttgactattttattatcataaccagcttgtacagacacagtttctagtgtagagatggaaaactatacggacagagaaatgtagatgttcagtggttcaatacttacagtctgtactgaatatatgttaggtgtagtgcttttgggaacagagggaggaaagccagcagaaaggaccaagaagtctgttacagacctcctcaatgtaggacactgcttgttcagtacaaatataatgtgaaccagatacatcatttacattttcctagtgaaatttctttgaagagttagaacagatgatcaccatgtaaagaatattattaaactgagaatatttaaagtattttaacacgcaaccaataaataaattatttatgcaataccttttttttttttccctgtggagtcttaaattctcattaggtacttgctacattttaaatgctcaaaaaccaaccattggctaacaggcgctgcctaccccagattactatgtccccatacccgtgtatgggatggatggggctaggggagtttatcaggctctaaagataacttctagtgtgtaagcaaagtagatgtcatcccaaaggagggtaatcttcagcccaggcaaaagctccctggtagagtaaacatcttaatctgagatcagaaggtatcaccggaattacaagacaaggaagcagcgaggtaaattactggatgctggtaaccaagagccttacccagaggtctctaatgtgttattgtctgacctggagcagggtttctgtttttccctagttgggaaaagaaaaggaaaaaaaaatgtagttttttgttgttgttttgttttgttttttgttttttgtggttttttttttgttttgttttgttttttcgagacagggtttctctgtatagccctggctgtcctggaactcactttgtagaccaggctggccttgaactcagaaatccacctgcctctgcctctcgagtgctgggattaaaggtgtgtgccaccacacccggcaaaaaacaatgtacttaccgaatcaagagaagatgctagtgatggagatgtgattctaagattacaggcaaattgtgtgatgccttggaatttaagagtgtcatttggggacaggaaataaggacctcaggctctgatatcttctcctccagacattgccagtattgtttagctcatgagcattctcctgactagtcgggtggtctcttcctaccctgtgcctttcctggcagacaaggatattgtcctggcatttagtgggaggcctactctcccttcagctgggattttccacgagaagccctctgttgctaagagggcagggatatcaaaaagtccagttttcgcttcctggattcatagatgcttaaaactaaaagaccttcagtggttagcataatccagtctccgttttctctctcagatgtgtaaaacaatgcctctcccagtcactactcaaattcttaggaaaagcaaaggagaattttaggtgaatttttacaaactgtaagtagtacatgggctctgtgatcagagttcttggttttgtccactgctgagcatagtggtggctcggatgtggctgacatgtatttagaatgactttctgtgtaagacgaaaaaggagtgaggaaaggattgtcatccaaaggggtgcacgctcctggcatagggaagggtcctcagcaactgctaacccggcgtctgggacaacatttgtttgctgtggaggcctttgcttatcccagggagttagataggcctctagccagtgggtgccatttgtgttctcctatactggggcaaccccaaatctctggaccttgcggtgtccctctcccccccctccaggggagtgggggacacttgttcccagttgcctacctctctggtcttgtgttctttgtctcagaatcccctgagacttattagagctggaactgagtaattaattatcaaggagtgggtttaatcctgtgggaagcactgtttaagtatggggaggagctggaagtctcacatttttgtcctgctaagcactgtttccattgtcaccagctaacttggctgtgttattcatccatccaaccatccaccattcaagttgtactgctccacacttgctgctgcctaggctcagtgctagttcccatagtggggaaaaaaatagggaaacatgaagcctctctcctaggcattctttctagtcatggaggacccactttagaaagtgaacatattcagggctggtggacggacattgcaccacaatgataatatcttttctataccgtctaaatcttgtctcattttttttaatcttttaaaaattgaacataggtcatcatttatagtaggcaagtgctctaccactgacctacatctccaaccctttttgatttattttgattcaagaccttgctattatggcccaggctggtcttgaacttatgatcttcctgctgtagactcccaggtagctcggattacctactcttttctcctttagcattacaatcttatttcacatatcattgaacagatgcttaaggcaataatgtaagaatacaaaaggtcacttagatatgtctttttatgaatgcatactgggtaaaattttggccaaaggatattaaaaagtctgtgatatttcacctctcagggaatccatcatggttttcccaaatgtccttgggtttaaaacccagaaagtcctttttgacctaggatgaatccagatgccacactcaaaatactgctttatgtcagctgcttcatcaggagtttctcacatctttttgggtggcatactaagaaaaagttaaaaataaatgcaaacaattccctgtctcagaaagcaaaattctttcggacataagcaaaggatttgcgttttttgtgcttttgtgaggctggtgttagagtttagtaatatgtcagtgtgaagggtattgatcaaaaggagctatgaaccactgggtgctttcatgtgatcccaaagtgcttctgcctttcagggttctgcttgttgcggtgtatattgtctgctgacaggcaggcacctttctgaccagggccttccagagagccagttcctctgtggtttgcattgctatctcactgaccctctgtcagcatgccacatggtggaaagggctatcccctgccttggtttgaacgtggctcatgcccacacaaggctatgttgaatcttactcctgagtatatcagagcagagaggtgatgggtcccataggaggcatttgagacaggaggcagggctctcatcagtggactgatgttttcctctcaggaatgggttaactgttgtgttcagcctctctcttccacatgtacccacttgccctcgcactacaagcccataccagaagctgaacaaggtgctgaggccatgttctagggctttcagaatagcaagcccaactaaaccttccctctagaggccgctcagtctttggtgttctgcgctagcaacagaaaacgagcagatacctgcctggttcttcatgatcagccagaaagtaaggaaacaagttctgggtactgataactatgctaaagaaaataagacaagacaaagggacagagtatgatatggagtttgtgaccagaagagacatctataaggaacctcgggcaaatggcagggaaggtggcccaggagaggcagaatgatagctctgaatgacaaagatgatcaggaccaactctctgcttattcttctagagaagtaaaacatccccaagtcacgagataaagtttttacccctgacccaccctgctgtagaccaggtactgatgctggtctgactctgttcgcactggtctcctgtgttgtcccggtgagcactgctctgcgggctgctctacaaaccgtccttcttctggaaagtcattccagttggtttgcttccctctctctttctctgtgcccaaaggttaccaacagtaacaacatgagccaactggtgagtcagacttactgtcgtcttcaaatcacagagctgactggttgagaagtcttcccaagtactatttaatctgttagaaaccagccttccctgatttcgttttgtaactctatatggaagagagccagagtctaactacagaaatgggtgggagcaattcgcttactagttcagcccatgtcttgtctagaaaacaaagttagaagatgaccgacacagccctttcctttcctggcagaatgcgtgtagagtcctcaccgtccatgattgtcagtcaacacttcttcatccagactctttcctgaggctctctttatggcctgcttagtttcacatagcttaatgtaaatcttgtgccctgccaaaaagacctatcaggattgggctaccccggtcttaatcctcagcctcatactgacaggtaccttctccagtctcatccacatcccagaaggtgaccgggtagacctgtacattcagctatcaggacataggctgagtccactaatgtagccatagcttaccatttgctagatccatggtatttctgttgcatttgttgtgtaagcactgttcacctgtgtctcatttctgtactatgtagttaggcttgcaatggctgcttctatcctcaggacttacaatattccttgttggcattattccctaagcaagacagtgtacaactgttgtcacagcacatacaatatacccgctactatcgtcatctggagatgactggacatatatgcttgttaatacagtgctgttttcataagggactatgtatcacttgatggacaaatgtcctagaaccagtcctggaaggaccctgatgcagtggcacatagagaggtcatagactgcgttcattggctacaatcagaccacagatggaccttcttaatatatcttacagttaaggaatttttaaaaataaggtaaaaatggcgatttcccataaaatctggatccagcacttgggagccctgcctgtgtccatggagccaagttagaggaatactattaccatctccttaggtgcagggagaccgggggacacactaagggtaggactgagattgagagtgagtcgtggaagttgtcagtgcctgggcgcagaacctacgatgagtctatgctgaaagctatgtgtgacgactggagcgtaggcggatccagcagtggcagggagtaggctcggggcggaagcctgtcttttcacacagtctgccccctttttggctattaaaagtccatactaaggacctcgtccgtaagctgtgagatccaaatacagctagctactttagtagaactgggcaaatggccgggaaggctgggggacaaagctcaagggttaacttagctggagcagactccacaaggagccagttgagagcattctgttgggaatccaagattcagcacagctgaagtgtttgtgtgctgccagctcactgcctgtgctgccaagggatacaccaagtggcttctgaattattgtccatactcagatcatatgctcaaactagagctgtaaagtcccgtgggagatggttatctggccccttgcggcctctgtagtaagagttgagctccttcgacccccagaggaaggtgagaatgtaagcctgccctcgcagatgtctacccatcccattgacagaggtgctgtggtagagaaaccttatatttcccacatgacgttacatttccttttttgcaatgacatttccaaggtgtattaacacttttcacctatcctaaatttcttggtagcatttcataatggttaacctagaaaatgtggagtatcctcagtgcaggaccaactctcctaactcacctccacttcctgccctttcccctcattcctacataggatccgtgtgttctcttcttggctaggccttggtcttagttttcagggtagagtataaccaaagaatgagctaagccagttcagggactccccagtctcagcatccaccagtgagcctcctctcagggatttttttcctagtcactccctcttcttgtccctcttttatggggacttgagcttaatctttcccttgtcttcaatagagtcttccttgccattaacatactgtttttagtaatgggtaggtgtgcacatcttcgtgtggctgtgtgtacaggtgcctaaggaggctggacctgctggctgtctgggagctgtagttacagatagtatgagcagcatggtgtgggtgctcaagattgaactctggtcctctggaatggcagcaagtgcccttaaccactgagccatctctccagccccttccttgccatttcagcaagtgtcagcataactcccttctcagcattgattgtgaacgtctccatttccatatggttgaattgtgatgaacttatgatcatttgtttgtccagtattgccagattatgtaaattggccagaagagccatgttctgaatgtcccctttagtattttgatgtcacatcctagtaaaggcaggagaccctggggaatggcagatgaagggagaagagctccaggtagccagaagctgctggggagcccagcttggtccatctgcaagatgagcacacactgttgttttaaaacaggagggctttggtacctgttccactctgcttcataaaaatagagcccttgagagggtagcactgaggaggcgggaggcaggggacaggaggcctgttgtgactacagcgtctgggtatgtgcagaaccagcagacaaagtgtaactggaaattgtagcagggaggtcactggacatggttttagtttacagagcatttttgtaattggattttgttatctttgcaaaagactgacaaagatttgccttggtactttgaaaatcatggggtgtttgtgaagtatttcatcttagctctgctgaagtcttctcccgtaggggcttggggaattctctagtgaagcagagaagcgggtctgccacagtgtcactaaatggggtcacagagcaccgtggtactgttagtggcccttggcaggggacactgtgtacagagatcttgagcattacagagcatgtttgccaaggccgtgagggaagtgcagtgtgagaaggatggtgctctctcccaatgcccagagcagcttaccatcctgctcctaagtgcagggggttgaaagattacagtgtaaccttttgagaaaatttcttagtagctgaggtcagtcaggtaccagaattgggtaggtacgtgaggggtcctgggcttgactgggacagcttgcgagagcctcactcacctttgggcagcagcactgtccacttggcatcctgtgacagtcatgcctatgtctctcttccagatcctgccgggcctgtacattggcaacttcaaaggtgagttattactttctgcttctttaatgatgataaatacattgtgtatcacaaagtgtaccattctggctatccatgtactcgtcaaaagccctaagtatcttcttcacatggctgtgtaaccatcattaccctcatccagaactttcctctcatcccagattgaaaatctgagcccctggccttccagagctcagtgggttgggcccgtgtgacttggggtttgagtgtctctcactaccctggcaatacctttttgaaggaccccagaaagatttgatttcaaacttatggtactttatgctgtgtgcacagctcgttgtcacggtgactgtggttgtgggtttccattttgaatgtccagtgatttgaagtcagtacacaccaaaggtttactgtcatcacccaaccaaactgatgaaggatcctgcatgctcaagtggacagctgagcttgatgagagagagagttactccagagtagcgcagccatgcagacatactgtgacacagcagagagcaggcaggggcccagcaacactggccattttggctcttgcctgtctccagggacccagcagcccacttggtcacgtgtggtagagtgggcctctttattcacagatttacagttctatctccaaaccacagtttaaaatggtaagctgttacaaaatctattttatgggtaatgaaacattttaagttaattgtggtcatagttgcacaactctgagtgtgctaaaacccactggcatatatgtatcctcttacaagggtgaatctcacatgagtcacacttttccttgaccatcgttaaaggctggagcatggtgtattacagcacaataaagttaaataacagtaaaaaaaattagttcattaaatatattgtccttcaatatctgccagggactagctccaggacccctcacagaaaccaaaaaccaaaatcaagttttttatttaaaatgatgcgacatccacacaggacccaatgtgtctcctctgcacctaaagtgtctctggaggattacctaatacagggcatgagttgtgttagagttgtactgtattgcttaccaaacaatgacaagaacaaaggtttgtatatgttcagtccaaatgtaatttcttcaaatatctctgatcgaattttggttgaacctctagatctagacctcctgcattcagggagggaactttgtatgaggtcaaatagtgattgctgaagtgtaaatcttgtagaagtggaagatcatcatgttatgtgaaacagccggactcaggaacacaagtgtatcctctcacacggaagtgagatgcaatgagaagggggttagtaaagagaggcgagatgaagcacaaatcagcagtggggaatgggttaaatacgattaaagtactttatatacacatcaaatgtcagaatgaaactctttattttgtgcaaatgtcatctgccagtaagtttttcttaaaatgtaaattctgatgggcttgggatctggaagagccctgaagaacaacagtgtcatgaacctgccccatcaggcttcccgtccagctgtctgcaggctccagtgtcttgagctttgtctgcatgcctaaactgcagatacaggaggaaattgtgatgtcctacattgatgtgactgtgtgggtgactgtgtgggtgggttcctgagtcaccccttttattttagtcttactttttattaatgtttttgagggtgtgaggaaggtgtgtatggacattggtgctatgctgccagtgcggaggtcacctttgaggctttggttctctcttacctttgcaaggactccagggattaaactccagatctcaggccttcaaggctagtgactatctgctgagccatttagccagcccttcctctacatagttctctcctgtttgtgttggttagctctttattactataacaaatagctggagtaatcaacttaaaaagaagaaaggttcacattactttgtgttgaggaggtttcaggccacagtcagttgacccctttcctttggaactgtggcagcacatctgttgggagtgtcccttgagaagattctgttcacctcatggtggcatcaaagtaagacagagaggaagagactagggtcctgttatctccttcaaggacatggcccacgtgacttacaaatcacctgttgatggacccacccccttcctagtggcactaacctgagcaacaagctgttcacgcacgagccttggaagacgttctgcactgcattctagaggacgacatgactcaaagctctatcactccagtttattacagtggtgtggggctgcggttgagatcactgtgtgtgaagtataaagctgcttttcaagatggaatctgaagctttggtggttgaatcagtgaggagaaccttcaaattaaaaacaaactttaacatcatttaaagaccttttcctgccactgcagaatatttagaacattggcccttagtttttgccctattccagggcttgttgggaatgtacatgaccttgtttgactatagacctaagaactagcctttctgatgtgcctcccagagaggttgtgtatggtaaacccttagacgcacccacacatgcaccatggagagcagacattctctcagcattccacatcccaattagcctgttcactgcatatcccactatatccatttctggctatctatgtttgtacagagtttctgctgtacttaaatttggtgcagaccctgggcagtttcccgcagcatcagaccttctcaaggaacattgtggaatttttggtcctttttttttcttgtatccctttgaagaggttggccaggggcaagcactcagatgagtgagccttctttcttgttgaactgttttgtagattagccaaggttttaaactcagagcatcggaaaattagccttctcttctcttacatgtggacacattagaagggaatgtaattttggtgccatagtttcttatgaagataattctaataaccagttgataatactgtgtggaatttctagaaaatgttctagatttttgttggtttgattttgttgtaacgttgatatagctattataaaccttagtcttgtctcagggtaaggattatccattgtacttctctgtcttcttcagtaaatgggttcttggactttacactcatcttaaggaatctgtaagaggtaactgttttttttaaaataaacatgcttaatatgtatgtatcatgtaaaaacatactatactatatcttgtatttcttttgacagctttcctaattaaaacatttttaaatctgagtaaatacttaaggtcaaaagttttatcagtcaaaaataaagacaaaataaataaaagcaaaagtcctaatttcaccagtctagattattctggatatgatcagttatagagttttaagaaaaaaatatgcaagttgtgttatgttttctgcctagactgtaagagtggtgaactcacagagaatgttaaaatgtccatctcttgtctttgatggcagacgcaagagatgcagaacagttgagcaggaacaaggtgacacacattctttctgtgcacgatactgccaggcccatgttggaggtaagaaagaaccaggggtgtgtgtgtgtgtgtgtgtgtgtgtgtgtgtgtgtgtgtatctgtctgtccgtgtgtctctgtgagtgtgtgtgtgtatttatattctgtggaagtgcacatgacattaatgaaaggagccatattctgacactagtctattcctgtggtcacaggacagattactttggtattggagttaaatgcctggcccacttgagggcatgctgtgtcctgacagagggcgtccttattgtactcctgctgcatggtttgcttggctcttttttctaagttctccaaaataaacttacattacatttccttttgaatattaagaatatttaaaacaaagtgtgcagcctagtggtcggtcataacctgcacttccagcactcgggcaagaaggtagtttcgagttcaaggccaacctggactacatggtgaattcccacctagcttaggctacagagtgagactctgtgttaataattaactaactaactaatttattaattaattaaaatttgggttgagggcctcttgattatagggtagccctagcacacgtgaggatgtaggttgcatctctagaaccacgggggggggggacatttaaataagtaaaacctattgctgcttcaaaattatttctgctttagtaggatcctaatgaattcaaattgctcatatcctgcggatgtttgccacaaaagttctaataccatttgttttaactagtaagaacaagaaggcaggcaagccacccctgtgattttttttttctttcccaggcctggtctgaatggacaacatcaatagagagctgttgcgttttaggtttaggggagtaaacagggtgtgtctgcttgtacactaattccaaaaacatcttcaattttaccctgttggacggtttgagctgttgatcaggagcaaaatctatttctgtttctgccgtggcacagcccaggttaacctcttttagaaaacaatgcctgtgtggttgtgatgcatgttttttctattttagggttgggtgttaggaagggaggggtacttgttctgaaacaaagactcctggttcaggctgttttcattgaaagccacatcatgtaagagtaggtagtatgtgtataggtatggacgtatccattttccttggctttgtagcctctgggtttgagccagtacagaacaagctaaagtgcttagacaagaacggaggctgagaagcagtctgtgagcctgcagcagatgctcaccactgcccagatctaccccatgttagttatcatcccagttggaagctcgctcttccttctgctgtttccatgggtgtttgctagggcgctgttttagtctcagtgggaatggcggctttttgtttgtttgtttgttttgtttttctttttgagttcaatagcattctgaaaatagttattcctgtattaagtaactaattaattaataaagcaacattaattgtttaatctgctaatgatagtttgtgtttaaaatacaggcattttaaactacacagtggtcatggctgacttcctcttaaatcacaagacgaagcttgaggttccctttattttaataaattgcatcgcagtccttcccaccctcccctgccaagcctgccttacccttgtgtactgattctaatggaacacattgtcgtatgcacactgttctcaatctcttgacttccacctgcgtacaaggtcttgaagtgtcgaaagtgagacaactccagccattctgtcacacacagaaactctggctggactggaaagtaaaacaggtgggattgcaacccaggtataaggaagctactgtgtgcgtgaaccccagggctcaggatagactgtgggcttccattctgagcacattacatgtccaccgtatcctgtgcactttgtctatagggacaaactgcctttacaaagagaagaggggcatggagaggggagctgctgtgccccttgttacagttctgatattttcggacatcctccctacagctacagttttccagcctgtgctttcagagtcctcagaatgttgtcatagccactggatactatcattactcagcttgatagtaagcggtcctgtttactaaaggttacactgcagctttatagcgtaacatagtttaacgttgcccatcttgcagcattcatttggtatgtcataggtgtgtgtttctataaagcttcttaacagcctctcctgctacatgtgtggggagtttcctagagtgatgtgtacagtaattaagttaccagatgtttagggactttgtttagccatcttcttctctgaaattccaacttcaactccaccttccaaattcaaatcatggcctaaccaatcttgagagcaggctgtaaagttgttaacatggggtcttccacatctggccctgatccttgaagggaatgggaaaggaattttctgaggacttcaaagccaggcatatttgtgaaactcccctagcttaatctgggcagcctttctctgagatggacaggaggtaaaaagatggcatcgtcccccaaatgaagggatttgggtccagataacattcaggtaggatttccagaagcaaggctgccagggagcagcatatgtgaggctctatggtgtgaggacctctagggtcatgtcaataagcccccgggttttaaggcattgaggttcttgccatctgtcgttagggtcttcagaccagctttcaatgcaggagagggcaagtgagagcatgtggtcacatcattggtcctgcttcaggaactgatgaggggattctctgagggtaagcggctgtgggtatgtgatgtcatgctttgggaaaacaagtttaaggagtttagaatgtcataggctcctgagaaaatcctggttaggctgaaaggacctttatgagtttctacagtgtagacacgtgtcgagtctctctgagcaaggatgttgtgagcatgcttgttgatatgacacatgatctccagtcttgtataactatattatctgagtgaccaaagggtattcaagcatctgccatactaaggccagaggagacagcacccagaccctgcacctaagactgcctctgtacagagtgcacctctccatactgattttctttcatgactgtgagagtctattctaggtaaaagggaaggctctgtagttttagtcccactggacacatatttcctttcagggtgtaacaatctgttttctgtcatagttccagagcagcccaaagccctaaactgcatccaccacacaggtcagttgaaacttgcttagttggtttgcattatgcaatacagattttatttttcaactaaataagactcttatgctttattcgattttagtttgactacatataacacaccattatctggtagattttggacaaagtttctagaatagcccttgaagtgtctaagactccctaccaccatgcctaaagggaaagactgcgagtcactgatctcagtcctccaaagcggctgagccactgtctttggtcatcaagtggaaccaggtatttctgatgacacagggtttgtgtggcctcttatacttagaataagaccgtccagggagaaaagcctggagctccaagtgtgttcctttggaaaagtaggtcttccagaatgaagacacttaacttgcttgcttgcttgcttgcttattgaaattcaagaaaaattctattagtgtttcaaagaaaaatcacccagtacaggcaagctaactcagtaactgcctctagaaggagaatggtagagagaaggaaaacgccacaccagtgtgctggaatggaagtcagacatgaggcagaaaagcaggcccagcgttagagaaagagtatccagtgagagcagcctggaacccacagcaagaacaccaggagaagttgacttttctgggtaattcagaaaatgtctgaagctgtacagctgtggccctgtaagcttaggaactctgagaaggaacggtatctcaataaaggatggttcttctgcctatttctaaagtaagcctgccttcccaggagtggtttctccgttaaagaattggccaggaccaattggactgttaggtctctaaccaggccggagattctgttctccttaccaaaggaccctcactgctactctgacatcctcctactccctgccctgtcctatgtctctgaggaggtaatcctaaaataatttagagacaaagtcaggctcagagcagaatgaagaccctcaaaaacatcataaaaggggccgaagagatggctttgtcagtaaagtacttgctttgaaagcatgaagacttgagttaggacctggataaaaaaaaaataccaggtacctcagtgcacatgtgtaaccccagcactgggcaggtagaggcaggaggatgggttgttgaccagccagtttagctgaaccagtaagctccaggttccctagagaccctgtctcaaaaagtaagacgaagagtcattaagacgcctaatgttgatctctggacccacacacgtgttcaggagcaaacatggacacatatatcacacacaaaagtagcgcagcacataaatgtagggacctcactcactaggagccccaactccctctgcctctgagattctgaggagctgtaatcccttttctattcctactgctcctctctctctctctctctctctctctctctctctctctctctctgtgtgtgtgtgtgtgtgtgtgtgtgtgtgtgtgtgtgtgtgtgtctgtctgtgtgtgtattgttagatattaaaccaaattcatggcttcatacatgctaggcaggtactctaacactgagccacacctccagcccagctactacctcagcagaattgggttcctacaggttcctgactccatcactgtgaaactagaatgtccaaggtccccatgactgcttgggtagtctgatgagaagctttttttttcccagcatgctccttgtctgtcctttgctgccatgctggcacttctgatgctgatgtctatagatatttctacattaaagaagagtatgcctcttaagctctccctagcacttgtgggggtgtgcctgttcccagtaccagcacaattttatttttaagcatgtattaattgtacaaactaatggactccattgtgatatttccatgcctgatgataatatacttggataatattcactatactctcttttcttttatccatttcatttagcaaaatttctgctttgttttgttttatttttggtaaaagttgtattcctttccaagacagctagctcttctacatggaggcagggagcaagcaaatggtatactcattctttgaacatctagtacatgcaagccagggagccgcactaaagatactgacctgtgctcaccatcctcatctgccttggcagaacctttaatgcttagacaggatcgtattctgaatgtcttataaacattcacaccattacagcctaatgaaagaagagctatggctcaaggtaggtgacaaagtcaaatagaaacagtagactggaagacctaagagtgagctctgtcttccattcgtaaatctggagttgttggcactgagcatgcttctaaacgggctttaagcaatgactaggaattcatctaatcagcttacggtatcttgtccagaaggaagctgacacagagagcagaatagaagctcctctggatggcccagactcttcactgtggtctatcctccaaggcttcaagcctggcaagcagtctgaattattcttactcttttgtgacagaactgatttcggtgacttcacctgtcagaaaattgaccctggtcagggttacattctgaggtcttctcattgcaaaggcaaggatcttttctcctgtgcacaatcatttaggactaagctttgatgtcagtcattgaaatacatattattagtgcatttatagggaaaaaccatagatacatagattaatttcaaataaaaaaaaaaaccctgtagacctgtagttacagtattcatgatataacaggtcctcatctgattctgttcttgggctgtggttgggaaatgctcatgtttattaggaggtgtttctttactggaatgcagggataggcagtgcttttagccaataacatgcttgcaaaaggccttgagtctgatcccccaaactgatgttaaagccaagcttttttgtttgtttgttttttggttcctgtgtataatcccagtactggggagacagatatccctggagcacactggctagccagcctagtctcattggcaagctccaggcaaaagagagaccttgtctcaaaaaaatggtagacatcacctgaggaaccatacctgaggttgtcctctgaccatcacatacatgcacagagcggcatgtacaggtgaaaacggtgatttttttttccagtcagaaacttggtattgtttgtaggtgctgaggaagtaatactgaacaaggaaaggcttctcccttcccctgagaaaagaaaccctgtctttctgatgtaaaattttcagagtttgtttcatttttcgttctatgtatttgagagagcacctgcaggaaacaactacttttcactattaatagaaatgccttaaaggtattcttatgccatcacgcagcttcttcacatcagagaggctaattagatgaactcgattgagaagcagaatctacatacatgcatgttatacgtttagtgggtagatcgtatgggctggaatttggtttgaatgttttcagttttgtattttgaactcttttagcatatatgggttagatcgtaactagcttgttttcataggtaggcatttatgtattcatttattatgagataggctctcacagtgaaacctaggctggtttacagtccctagtcctcctcagtctcccaagtgctgggattacaggcatgtgccaccatgccttgtttattcgtaatggtcctgatttttatttcctgtaacactaaagttactttctgcgttacccttctccagtatctaattttgtggttttgctttccttggttactcctgtttgttctgacacaggctgttatctgtgtgtctctgcactgtctgcactcacgcacccttaatgaggacatactcactaggattaggtgctgcatctgcttggccagtcctcttctctgaccatggggatagactcagtggctggtagaagttcctgtaggaactgtggccctcctgccctacatccctctgaatgtcacttgagcagttttgttggcttctgaaatatgaagaggccgtctccttccagccagaaccagagttggagggcgtttaaagtttaaggaagagtgcttctgttgctcctcctggtcttcacagtgcagctcagtaggataacgcatgaatgtagcaaatactgatgcagtcttgcctgtctctgccagacttcatccctgctgcatgctcagcagggaaagacaggccttaggcttctctcatttctgcagtgcctgtgccgtgcgtgctcttagttgggacatgaattttgtccacccatgacatgtttaatgttccaagtctttttggcccatgtaatgcctgtggacaagtgggtaggcactccactcctttgtggcgtttctttggttctgatggtgtgtagttcagcctggcacacagggatgtagatgtccgccaaagaacaaaaacctgcttacaggttaaccccatcccaaatgagaacgcatgtctttggtcacatgtggctcatttgtgtaggaaagcagagctgcattgagattgacgtcatgtgaggcgtctgtggtgccagagggtctgattagtgtgtcgcagcctccagcacctaggctgctaccacagcttctcacttgccaggagctgaaggcatacatggtatctagttttgtggcgctactaaagcctctcttgtcgaatcactaacctataatcccctcagaaggttcagtgactttctcattgagctctgagtggtccgtcagctgcctttggttggcaatgggagatcggccccataaaaaagatgacacaacttcataacagtcactcaacagaagctttgccatactcgaagcatgcatgtgaggttgaaggagatggtgtcttggactttgtggtgcctagaggtaagaaactgaggttacatccaagcaaatttccctgttctggtgtaggaaacgggagctccctgggcatacacttgggtgttgccttctcctctgcctctcttgtctgatgcccactgtgttcccctgtacctgggacatagagacctagcaggcagagtgtatgtgaatgtgcaggcttacccaagttgtggaaactgtaagtcacatttcttctagcataaggagaatagactccacaaaccacttgaaacacacaagagatgtgcagatttggggtacactgaagttcatggacacagtgttggtaatggcacaggagtagaaccagtctcagtccgtgcatatgcaaaaatacttgaatcaatccccaaagaggggatgtggtgtatttaaagaaaacagctctttaagaaacagaagcttaccctataggtagaacaacattatgaactaaccagtaccccggagctcttgtctctagctgcatatgtatcaaaagatggcctagtcggccatcactggaaagagaggcccattggacttgcaaactttatatgccccagtacaggggaacgccagggccaaaaagtgggagtgggtaggtaggggagtggggggagggtatagggggacttttgggatagcactggaaatgtaaatgaggaaaatacctaataaaaaatataaaaaaagaaacagaagcaaatcaaagcaaatatttataatatgatctcttatacaaaatgtaaaatcatcatcatatttctattacatatataaatagagtctgaaagaataataacagacccccaagaatgaaggagtagttttttccttatgttcttttaatctttaattgtcttgttccagtaagaacagtggttctcaaccttcctaatgctatgactcttaatacagtttctcatattgtagtgaccccccaatcattaaattattttggtttcttcttcatagctgtaattttgctactgttatgaatcataatgtaaatatctgatgggtaacccgtgtgtaagggctgtttgacccccaaagaagtcttgaccataggttgaaaaccactgcaacaagagtatctctttgagtgatggccaagagagattagtgagcaatatccttagtgcctgtgataacaatgggtatattgcatgtgcatattcaggcttagcttgaaaaaattgtgtgcgtgtgtgtgtgtgtgtgtgtgtgtgtgtgtgtgtgtgtgtgtgtgtatttatcaccgtgtgccatggattcttgtgtgatacgtggcatcaaacatcctttgtggtctgtggtcagcagatacaaagaaagtatatcttccacttcatgttgtcttaatcttcaaaggcagaagctagcccaggacatgtctacaacgacagaggctttgttttcaacatcaaacagtctgtttctactgggttgactgggcataggaatgcatttatgcccttctttcaggattcacagatccacctagtgctgcagcttcaagcactgggcagtgattcctctgtagatgcctgctgtctcctccaaactggctgattttgttttttaccagccttgcacaagcaccaaactacccactggtggtgaatcccagtgtcttgggaagcaagcaactgtttgccctgggcttagtttctaattgatggttgtttcttacaaccttagctgggtctcgcttctctaggaaattttctagatgtcatctcaaaatcagtggtacctactctgctcaggggttacagtacctcttgtgtgttaaagcaaatttgtttgaagccaaccccagacttaaatagatatgactcaaatagaaataattactgtagggatcgaaaactgtctagtaattgttctttcttgactcagcttgtgtggagcagccaagtgcagaagagattggctcttatgtgcctgctgctcttctgccagcatcctgtctgcaaatggagtactagtgtgatgaggcttcgtggggcaagaggaaggctggagcccctgataccatgtgattctgaggaaatgtgtttcttaaacctccaaaatgaaggaatgctatgtttgcctcctgggagcatagccaggctttcagttgtccctcctcatcagacttccctggagtgctcctgctccctagcctaccttggattgctggatgatacaaagaaatatcaaggggttctacattgatacagacacataaatcatcccagtgttgcagagttgcaaatgtgtatcaggtagaagggtccccaaggcacccaggagaatgtgacagccaggaagactgtaccaaagggtgagagttttgtttggtcctgaaaaataacaagagcttgctaggtggtgacagtgaggacagttgaatgtgattcctagtaaagagcaacacatggtaatgcggtgcagggtgtgtcctggcctgttggaaaggctcagcagacagagtgcaatgcatcagagtggctagactggaaaggcagcctcagaaaggaggaccagttgtttgttaggctttagagtcttgtgggagttagagactcacccaagatttgtgtaccaatcaagtgacacagtcagactgcttttccagtagttatcagtgcagaaacagaagggagggaggagatacacatcttagagacccctggaagctctgccctattcctagttagaaataagggtttgacctggactactaaggagtgagatctgttttctagaaataaaagatcagattggatctgggactgtcgcacaaaatgatacagcaatgttaaaaatgaaagaatggggaaagattcaaaagcaaattgagccaaaagaaagagggaccaacagtggttccctgttgtctattagacaaacacatgatgggtacaaagcaaagagtcagctactgtaatgtcagaaggagtaatccatcaaaaagatgtaacaaccattaacctctgggcacctcagaaacaagttaaaaatagccatttcttgggtagagtggaaaggaattatctcctgttcagttgtggggtggggcaagggaggtgtcagagtaccttacataatagcttcatggcgcagacactcggacaactgatggatatgcacacccgagagctctgggtgatatgttcctgctgttttccaaagcttgttagaaatgcaggtccattcagtgctccagagagagtataggttggacagaaatacttgagcattttctcggtaaaatgtgtggccacttcattgggtctgaataaaaccatacgagaaagtggcaagataggatggccagggagtcatgtttgttatattacggtgttggtgtttgcagcgttgtggaagatgacatcagtcaccaagtccacattgtgatatagctgtctatgtgttgttcctactaatcccttgtacctccagtcctctggctacagtctttaaagttctctgcagaggcacagggttctctgggcttggaccgtgtggctggtttacattttgttttctctcaagcaagcatccttggttccttggttatggtcccacaccttaggagacccttatccacgtggctattgtaggcaaccacaagagagggagttaggctgcatatcaagcaaatgggacaggacttagtgggcatgtgatgtctcttaaggtgtttaaatggtagcttatcttagtttggtgaggtaaccagagagaatctacagagggaaagtgtgtctctggctctggttgggacagtgcagtgtatgcctggcagacactaggcaccctgagcactgcgaggagcagggacagtgtctatcccagggggctctatgtgtggaagaggcctcagagcctgcagtcagaagtttgaatggcaagcagaaagtgctcaaaggcaaagagttcagtcagggctcaggcttactgtgaacaccatcattgtttttcaccataggaaaaatgattatttaaatagatccagggttacttaagattagtttaaacaaatctgccattttcaggtgctcttaataagtcattgctaggtagtgacacaggtggatccgtgcctgtccacacctgcaagggaagtgatgcaatcttatttagggttgaatgtggagcaagtgcatagctggcacctttagtgcagacaaacaagctgtgctcagaacgcttctggagtgtgcctcccttcctgtggcccagcccccctgggatgttctggaaacgagtgtgcggagggagggtgacatccgcccctggacgtacattgacatatcacttgtcccctttcagctgttaccacaaccacagcagatttcaatttccaccttggatcacagagtgggtgaattgttggccacctcttgacctttttgatgggaaagaaaacagtgcagggtgaaagttaaagcacacagtaggaggctcacagtgcagtgctgggctcagtgttcccactatcataaaacccctctcttttctttctcttcctctttcccttcctcgatctcccctccccttactaaggatttaattcagggatttctgcaaactaagcaagaactcgctcactaaattcaatctccaacgccttttcggactctgttttgaggcagggtccatgctgctcttgaactcattctggcccagtcaggcctggaacttgcagtcctgcctcagccttacgaggagctgggattacagaactacaccaccaggtctagcttggaatttttttttttccccaaactttcttgtagttaaaatgagatgagccactaagccctcggttcttctgaccatggccagttggggggatgaagggggctgtaggtgagaaccagctgtctccttatcacttctggggtgagcagcttgcatggacagaaccaagcccaggccttgagactccactcctaggaacttgctagtatgatgtgacaaatacatcctaatttacttaagttcaagtttctgttctcaggaaccagcgccatgatcccaaggaaaggcagttccttactaaggctgctgaacttcaactgcatgtggtattctaccctcaagagaaaatggttcatggctaacctagtatgagtagcatatcctaaacatctcttgttttgttttcttgttccctttaaactgatgtttcttgtctcttctgatgaaaaactattcttcatgcttccataatgagcaatgatatcacaagtgagtggctcttactggccattctgagatcctgatgaccctctgtctccttggtggccacagtgctttctgctctggggcttccatctgtgtccagtgctagagcatacagctgttgaaataaaaatagcccatcaaagtgttcacagtgaagggggagggttgtggtaaagcactccccatcaaaggggggccctaggacgctggtgtctacgctgagagaggaaagcacccttccagctgcacctgccatgttgtaaacctcaggcagtaccatggcaaccactgcagcattcacagttgaccacattgcagaaggatgcttctccttgtgtggaggagatatggcagaatagcacccttgccttgcttctccctaactgcccagctccagaacccttgctattctgaaagctcctcacattctcatggaattcaaacactcttgctaaatttggcttctgctttctgggagcctgaaccctaccttcaaggacttagctagcccttaagatcaatactcagttgagtcaatatttccctcctttccaaacataccctaagtgtgacctagagaagatctctcgtcaattaaaaaaaaaaatgaagtctcccaattaaaaaaaaaaagaattgttgtgagatatatgtgtgtgtgtgtggatatgtatatgtgtatatacatgtatatgcatacatatacataaatatatgcatattccttaatatatacattgtaacctgttcagtctatataatgttacttgtatctataagatttgggtctgaccacatagcattggataaccaattagagggcttttccctggagaaactatttgttccgttctcagcattcctgcagttctttgtctggagttgatgccccctgaggtttctcttttccttgttatcgtttctgctggagtcatccatgttcgtatctcctctagacagcctttgcaatggatggtggccattacagaggaccaaggcccataaacatgtagaagttaagtactcaaccctaactgatatatctacaacacaagtgcacctgaggctcggggaccatagcagagggggagtcgggggactgcaagagccagaggaaatggaaggttctgtgagatgttgtttcataaaaatgtcagagacattctagatccatgaagtctcatcataatggctacctaagttgttcattcttatgagcacattcaccaagaccattagcaataggcagtgaaagttgaggctaaagcctcctgagatgaaggcatgcgtgtgcctgcatgaaaccatgactctagagccagctccatatgccatagccagctttgggatatatgggtttgagttttgaaagatgcatttgcttcttgaagcatccttttcttcacttaaacacatttgtgactgattttcaaggagcaagagctgagagaatgggaaaacagtgatcactgtaagagtttggggtcaagcaacccaagcttgcatgctgggcgaaggcacctgcattctggggtcagggaggaactcagaacacaaagctggagtctttgtgagccaagttggggagagaagctttcaaaagagacaccgcagccgggcagtggtggtgcatgcctttaatcccagcacttgggaggcagaggcaggtggatttctgagttcgaggctagcctggtctacagagtgagctccaggacagctgagactacacagagaaaccctgtctcagaaaaacaaacaaacaaacaaacaagagaggtgccgcactatgttgaagttctgctgaggaaaggccattgggaggagcctacaagagaaggaatcacagagactgtacagcaagagctctggagaggggtccagggaaggacaaggcctgcagggactgagtcgtaggcaggccagtgggtctgagcaggccacactaagagtgcagaggacaggtttctgtaggagggggcagtggacacacgacaggacttgaagttgggtcttctttacctttcagattcagagccacacacgtggtcagataaaatgtatcttttacaggaggggtgttttccgctctcccatgtcagtctctaggtagcatgttcattcacaatccttgctgtgatgtgcttagacggcaccgctctgcatgaggtgcactgcagaagcctgcgtggcaccgctctgcatgaggtgcactgcagaagcctgcgtggcaccgctctgcatgaggtgcactgcagaagcctgcgttttgagcacacgctaaactggcctcagattttacgagtcacagttggcacatgagctgacgctcacactgagccaaattcagaagagtcggggaggtacagcaccctggatctcccccatggccttcctataatccatcccttgtgggccagaggaaaccccttgttctaaggccactttggtctttctttgaaaccttgaacaaaaataaacatcagaatcctcttctgtccctctgacaagtcagatgtatgtcatcttttgactaacctgaaagcagcggcaggtgtagaggcttctcatttgcatcttggctcacaaaatcaaacccaaggctaaatcttacctctccactctgatggtcccgctcccccgccccaagccccaccaaggaccacagtgttcttggaagttagtatttgtagtatagtgcctaaatttagcgtgcaggaagaatcagtggcatatgggtactttcaggaaatgccttttcagttcagaatcgagacttgaagcatgaattatggagtctcactacaagaccgcacttatcttcagctgtgctctgccaagtgaccaagaacctcataggaatctaaaccttacctagtctttatcttctgtaacaaattccaactcccagtcaaatggcacttagataactgtttctagattattatccttgtgaacgtaaccctgacttatcctttcccctttaatgcagtatagtgttttcacctgttatgggctgtaggtaaattcttagattgaagggagacatcaatccaaactcatggaccaggcactgagcttagcccgcacacatacacaatagagatattagtctccatcaactctggactagacacccttgcaaagatggccttgtgagggagaccaacacagtctcatctggaatgtgcatctcaaggaagtttcaagtcaacagttgtcatctcttgggtctgtgacctctaaaaatctagtttttcaaagtttacttcctttagggtttttttttttttaatgagatacagaagtacagggacagagatgagaatggtcatctccacgggtaatgaatagggaaggaaaagagttagtgtgggcacaggatctgatctgggcggaagagtaagttctagatatggatgatggcgatgatttacaactatggacgtgttcacttaggaaaggtcagaatggtacctggtacggtggctatctatgtagtcatgggtattgaaaagattagatgaggatttataagttcaagaccagccttcgtagcacagagaatctccacttcaaacaaacaaacaaatcaagcctggtggcacaggcctgttactacagctactcaggaggctgaggagaggatgcaagttcaaggccagtcttggcaactttgtaggagcatatgtcaaaatagaaaatggaaggagggctgggaacccggatgtggtggtggtagagcatttgtctagctcgtgcaaggcctgggctcagtctctagtttttcccccccccaaaaaaaaaaaaggaaaataaatgtaagaaagtagatttgcattatgcatatttactttaccatagaaggaacgagtaccggtggtcagtgtgggtgttgggtgtttccaggctcttggcttttaagccagagaactgaaggtgagtgctgacacagatgcgccaaagtagcaaggaaagtattcagagcaaaacagtagaaaagatcaggatacactgccagagagcagcggccacgggtaaagaaagatattctaggccccatttattgttcagagcttcccttcatggactcaagagaagaaaacctttggttactagttgtttgagttgttctctattttgagtgatagattacctaataatttttctactgcgtatgttcccacagtgcatcagattttaattctgtgcatatccaattatgcataggcataggatagtaagtaggggattttccctgaaagattccttgagcatgcacagttgctttactgtgaatataccccaaaccagctcaaactgaaacagattgtctattcttcatattaggtgcattgggatacacttgaatagaaactgtctaaatttgatttgctgagggtaaagaagtttatcctattttcttagagagagttgtacaggtagtccagtgcaggcatggatctaatgttgctaggtgctttattcagagagggttatgtgtgcatagtacacacggaaaaaggatctaggctgcctggtacattactagagtgggagtgtgtataacccaaaccaagctgggtcccaggttactaaccgatttccttgcctgcctcagtgttgtcttcaccaataaaatatgctgtgtggttttggagttttgattgtttctgttttgagacagggtctcatgtagctcaggctagcctcttactgactgcgtagctgaaaatggacttgaactctgatccttctggttctgcctcccaagtactgaggtcaaaagcatgtgccaggcacatggctgacgctgtgagttttgtagcagtgcataaagtcgtggtctaggttctgagcaaatgagctcagtccaaattctaattttgcttttaattttaattttttcattcttggagtggagacccggtggttggggcctggtgaagttagttcttagtagggtttcaggtttagtctgtccttgtgtcattaggccttgcaagtttagatctgggaagacctgcttagcaggcctctggaaatatgaatgggcttgttgtcaaagagatgccatgactgtaggaggaagccccttggttagcctatcctatctcgggtgctcacatctaatcgtggcatcttttttggcagctaaaataatttttccatcatgtggatttctattcccatccagaatttatactctttcattagtttttagtatttctataaagatgcaattggtttttttttaagatatgtggcatttgtacatattttatcacaggtattgtacagtgtgcagtgattaaatcagagcacatatgtagcctccattctctgctgttgccacccgtgtgtcccagccacattctggaatagttgtctctgacatcatcctctttgccatggctaatccacatgcctccctccctgagcctgcccaggttctaatatctactaggccacctgtatgagaagaacatctttagctcctgtgtgtaaggaagattgtatgtacaggctataatgcccccagagtccagccatgttgctgtagagttctgttcatacatgcttcacccttgcttccttgtgagaaagaatggttgtgcacagctggatcttgtgcacggcaggtcacctggattctcagagactcttgctatgtctggggttggggctagttttagaaattgcacttgaaacaagcaagagtttggcctctttcctggttttgtaatcagaagcttggctctgcctatgtgcatagcatttgaactgtcatctttagtttcagtccaaagaaaggcaaacccctgccttttagtggttatacttgcagaaacagaaaactgaaaaatggtggaacttttgagacctcggcagttctggtttgttcagatcaagcctctggtaagctttctgaactttcttctctcccagtgatatgtaatttctttctaactttcttcttgacccagtgttgtctattgacgtaatttcaaaacctaaacacacgaatttcagcaggaagctagcttctcagggcaggccgatcccttgtaagtcctgtgcttctgccttgtgttttctagcgtttgcaccatgtgggtcttggagtggtgacggtggagcgtgtcatccccacactgtgggcacagtgtttacacatccccttgcttcttgactctgctgccaaactcatcactatggctgctgtttcctggttatggtggcccctcaggaggccacagaggacaaagaagtgtcccatagaaactgtgacttttaaagcgctagtggaccactaactgagccagttttcctgctttagtgcaacatgaaactgttctgtggtttgaaaagttttgacttgatatttaataactccatagatgctaactggcttcccagaagcctggtgttctgaaacaccatagaaagtactcatttttgttcttctatattttgtaagaattttatctcaaggaataagaaaaacaattttgttttttatgtgtttcaaaatgtagagaacacgaagcagaaaatatatagcaattgctatatatactactggaaacattgtttctatttttactacttgtagattttcagttggatttctctaagttctttattttaacctcctttcctgctatcctttacacaatgtaactaaaaacatcacacacacacccttcatccttcactctgcaaagctcgccaaagaactatccccttgtatagttcatagataggaaatgtccgttctactcattagaacaggctgatttaagtcagcccagctttctggtggcacaggggtctcagtgctgctttctgaattagtaactaactgttaaaagctgtgcacatgtgagacatctgacgccctttttaggtagcttagttctgccttctgtagcctcaaagatatctgtgctttgttaatgactaagtcacgataaatagatgctttgggggggcgaacagctaagcctttttgacagttttgactccttcaatgacttgatttgcatatttcttattgtaggtcatagtgaagtggtttgagtgtcactagagcatatgtagacatcatgccctttgcatggcctaaaaaccagctgtcttcctttcccagtggtacttaacagcacacacacacacacacacacacacacacacacacaccctagaccaatctcacactgtgaccctatggagttgattaacacctgtctgcagctcttggactttgaacagtgccagccatgggccaggatcattccaggaagtgaagtggtcttgcggttatataatctctgatgctgcattgtcttgtctttttctctgttttggtttaactgcacacagcacccaaatgtaacagagaggcacacattcctttttacaagttgcaggagtaagaaactgaaggtgccgcatgcccgtctccactgtgggggcaagggccctagaatggccacagtttacttcctaagcctgtgtctcaaagaagggagaataccttctacccgttttctatggctggtagagcctcctgcacaccgggctggttctacttcgtgggcccaagcttctttgcctctgtgcatcaggtagcacacaaataaatgtggcactgtcttgtatagcctaaaggaaacacagtgattcccagtttccctgctaacaagtggtcaaggctttatgctcttagcaggcaaaaatgcgatatggcctaacctgtgtccatcctctgtgttttctgtcttgatctatcttcccagtatacagactgggctgacttcagattctgccagcagccagcagcatgatggagaggtaggcatttctgtgttggcttagaggagtccacttagccttttgcatgatgggagttgccaagctgagatggcagtggcacacttgagaatcctgtccctctggatggaggaagtatttgggaggagggatttcacgagctcctgagcctgaccagctaactaccagttctcactcaggagccaaaggacagaatgagggactcccattggcagctggaggaagcaaggggcgtgtgtattagacaacacgcatgtagatctcaggggaaaagaggatggaaaggaatttttttttggcagaagtgctttcttttctagtgtcttacccttcaagttatactgcaatttgccaccaggtttggaagagctttaaatgtttaaaataactggtcagtatttccagcatagcacagctcctggggcccaggaaacatgaagacagggaagaaggggacaggtggaactggaaagtccaagccatacaagggagagcctactgcttccctccccttccctccccttccctcccctcccctccccgctgacagagcgtacactctggcaagtccatttgctcttgggtgaagtgctcctatggggatgaacagaggttaaattcatcttctctaagactcagaagactgtattaaaagatacaacactgctatatgtataatgattttctttcaaattatgattaagtaattttttttcaaagcttgaaaaggtacatagaaatgaggggaagttgatttttatttttgaggggtttttcccatgaacccccccccaccataatggcagatgggaagggatgggattgtaccattcaggtgtctatttgctgacaacagattggtttcagcagattaaaaggactaaggggattaagaggtagtgagaggttctgagagctggagaaatggtctccatgctgaagtcacaggaccagctcaccgttctcattatacagcagtgtgttctgcctcctcctgtcccagcaaagcatgagctgccatcctctgtccctcccactaggccacaacttgccttctgtaagcttgctggaaatagaagggctggccctgagccttcactcaagcatcagggtgggtagacatgatgcctgaatcatagctgtcctgttgttgctccagtgacccccagagtgactgggtcagcagtaaaatttacagaaagacaacaagtaaatctaaaaatcgggtggctgcgggccagtggtggtgcatgcctttaatcccagcgtttgggaggcggagacggaggtggaggcagagaggcagagagagaggggggggagagagagggggtggggagagagagagagagagagagagagagaggcagagagacaaagagagagaggcagagaggcagaggcagaggcaggcagatttctgagttcgaggccagcctggtctacaaagtgagttccaggacagccagggctacacagagaaaccctgtctcaaaaaaccaaaaaaaaaaaaaaaaaaaaaaagcaggtggctttgtagcttcctttcccaggggacttggctatatctgcatcattattggtcatcaagctggcctctcacactagtcagttgtctttgactgtccaagatgaggtaacaagagtctgtgacagttggcaaatccaggagaagatttatgagtgattcatctgtcctttaccatgctcctctgccaagaacgttgaaatctgtgtgccctttgttgattgacattgaggactttagaactacagtgtctgtctttactgtacagaaataagccagcctggtttctttttataagacttaagtttgggataattttgaatcattaccttagctaaagatttttccctcaaattagagagaaataaagaaatacattagttaatcgctcaaatttttactgttgttctgcaaagcaggcaacattgatttcaggtttcaacagcctggtaatagaattgtgattcttgtgacactaagataacatagaaagctatggcgtgacatcactctctgcttcaagcctgttttgaaggtattgagctgcactgtctccttttgggatattcaggatccgaaagcaacacggaacatgtgtgcgcaagtgctaagaggacagttgtgagccttgacacccaactctgtttcttctttgttgttgtttgatttttttttttttttggatcctcaaattgtatttaaatttgttatatatgctgcttgcaaaccaaagcatgaatattgtcatgcccatggaaaagaatcaggaacccgagttaaagagcttttcctcagttcctaggcaacaaaagacaagttaaaaaaaaaaaacaacttctcctttttcttgttttttgacctgagtaaatggttccttttaatactttactccactgtgtatgatcttatttagtttcatttatgtattttttttcatctttctacagggagttaaatacctgtgtattccagcggcagacacaccatctcaaaacctgtaagttgtgcttttgggtttttgttggtttttttttttttttcatgtatttttttggagaaatcaaaagcaagtgcagtgtgtgttccagcagttcctgagccaaatgaaaagcaaacacagggctctgaaggcaagtaagcaagccccgtgagagcccggggagttgcctgtgtccctacatagctgctccccgtggagggtaggggggatttacagaaatcaaactggagaagccagtgtcaaactggctggagacaccttgttactttccagtcctgctgtgactcatggaggctgggatgtccacaggaagggccttttaagtctggggagaaggctcaagtcagtaaagtgccttttctgcaagccctaggaccagagttcaggacccaagcacccacgtaaagtctaacacaggcacatctgcaaccccagggctagagacctggagataaatggaccctcagagtgcattgctcagctagtctagccaaattaatgagttccagattcagggagagactgtcttaaaaactgaggcaaggagtgatggagaacacactggtcattaacctctcactaccacacacatggactcaagtgtgccttgcaagcttgagggtctgagttcagagcctacaaaaatgggaggtgttggaggatctctggaaactcataggagagttttcctggtctgcatggtacaatccagaccaatgagagactctgtcttaactaagacgtgggagcacttgaagaccatgtatacataaatgtgtgggcatgtgtgtcatgctatatacacttggaggtcaaaggacaacttacaggagtcagttttcttcttcactctgggttccaaggatctttttcaggttcaggcttgtacaaaaagcacctttatctgtcagcctgtctcccagtgccatctttgtcattttaacaagttaggatggactcacaattgcagctcccttaacagcagcattgcagacttgataggatgggatggagccttggggactcagttataactccaacaagcacccttggtctcaattaggcccagcatggataggtgatagtttccccaagcctgcatttgacccttgcagacggagatgctaggagtgctatcactttgtgaaaccctgacttctgattttctggctgtcttggcttagatactggggaccagcacaacagccctctggatccatgtgctagtgtttccatgagaggcactccagattcagatggtttttttgagtctagaagaccacagggttcaccctgcactgtgtacaagtgctggcgcatacaggtcttatatgtcagtgaggcagactacatacttgttctctgtcccaactgaccagcttctctaaaagatgctggagtgttggccaccctacgtcttcgctgccagagagcagagaggtcatggattaggctgtgactttatagacctacctattgcaggatgggtggcctgggtatatcagtcagtgggtagcaggacaggggacagaggtatagagttagaccaggaaaggactgaggaggtgggaaattggtacagacatcatgttctgcccgggccaggtctgtctctacccagactcttgatctttcacagagaggtgagactttaagactgagaaagggacaaggcagattttactaggaaaacaaagtagtagtctcatctggaaggagaaacagcaacattggagaacttccttggttactagtcgtgtcaagaaacagaagtggttggaagggcatggtccctgcggaaggaagtgaggcgctgcctttctccgaagaccacagcaatcttctacccttgttttggtgactatttttggaatgattgctttgctctcatctacaaccaagatttgaccatgctgttgaatgtatcagtacctgattgtcaagaatccagctggaacttatcttgggtatgtgctgtcaggacacatggcccctggtctctgagatgctgtaagacttttctaggagctaattgctgccttcatcttccataaccgtggtctcattacagtcctgcattatggacagaacaagcaagtgtcagaaaatcccagatttcaagccagtctcaagccagtctcacttactgtgtcaggtcattttaactagttacattcaattctcatctgaaaatgcccatcgttaggatttggaatggcacagtcagatctaaatgagagtatttctgtgaactctaggcactttcaaagtatgaatctatttctgctatagtagatgtcttcagagttacaagaacgattattgagataagttttgataacagcttaagttttatttatctgttgccagtgaagatggccgagtgtcttcatcactttctgttgctataatatctgagaatattctgttgctgaatatctgagactggatgattaatcagaatggaaataagtttgatccaagattaggctgccacatctattgggagacttgttactgctccataatactgtggtggaaaagcaacaagggtgtgtgtggaggaggtggaagggaagccaagtgcttgaggtggtcatggagacactacctccatgatccagacactacattccaggccctgtttcccagtactgccggatttaggagttaaggtcccgaaaacgacctggggaaggggcactcagacactaacagtgaatgtgattccatgatcggatcaaatgcttgcctctgtctgatgcgacttagagtatcctgcattcactgctcacaacacactaggagttctcagtgaacctgcaccaactagtgcagcctgtatcaactagtgcagcctgtatcaactagtgcagcctgtatcaactagtgcagcctgtatcaactagtgcagcctgcaccaactagtgcagcctgtatcaactagtgcagcctgtatcaactagtgcagcctgtatcaactagtgcagcctgtatcaactagtgcagcctgtatcaactagtgcagcctgtatcaactagtgcagcctgcaccaactagtgcagcctgtatcaactagtgcagcctgtatcaactagtgcagcctgcaccaactagtgcagcctgtatcaactagtgcagcctgcaccaactagtgcagcctgtatcaactagtgcagcctgtatcaactaacgcaggtgctcaggagatcagtgttcttttttatttaaatgtatttatttttaacatagatctttttaagaaaagattcgtttaattttacgtgtatggttattttgccttttgcctgtttgtatgtctgtgtaccatgaacatgcaaacccccagaggacagaaggtggctttgaatcccctggaactagagttacaaacaattgttaggtgccatgtgcgcagcaggaactgaacctaagtcctctagaagatcagccagtgctccgactgctgggagtaaaccatcactccaaccccaagataattctcagtgctttgggtaactaaagcaagagaaaacgtcagtagtttatataacttgctctcagtaaccccgatgcttatcaacaggccatctctcctctgaccatattgaattcctgatgcccggttccctctcttcaatgacaaaacaactcctggaaatctgtactgcttactgcgtaaaacatagatagtaacttttaaaatgatttctaagattgagtgaagtgctatatttcgtaaattaggctggggacataccccagtggtagaatgcttactgctataaactttaactatttctttctcggcaaagcctgaaccggcagatatttaggccgattatgcatagtaagaggtgtgtgacctttgacactccagttacctgatagtcagttgctctgaactgcagaaatgttggttttctgccttggccttaatcctagagaatcttccccatctgaccttccatgaacttgaagtgcagagagctggtttgagataacacaagcacagaatgttagctcagttcccccagccacctagcctgcccaactcaggaaatagaaaagttcaagttctccgtctcccgataaccccacaacccgagtgtggtgtgctttgcatgatgttgtcctaataagagatgctggagtgggtgttaagtgtgttgggggccagtgctggaaatcggtttgcgtttctcttctctatgggttttctagagcaagtcactttaaccttctcagtgaataatctgcccatctcatcaaagataatgtatggaatggggtattttgttaattctttagtatttgtaaaataagatgtattttttctgtgttcctgtaaggaatgctaatgcattttaaaagtagatgtttagattcgtattcacttggatttgcttattttgtttttattacagagtaagttggtgtttgtagccaagcagcacttagtggataatttttctttcttttctctgtgaattctgagggagctcgctcaggctccgggtccatagcattgcattgtaatggtgctctctgtggtgatctgtggtttcagaggcgagcaggtctctgtttttggaggtcttgtggagaggtgagtgtagggagcacactgagctcggtatgggcatcgggagcgccctggtctcatcaccaccatgttgttggccgtattgtcttagtggagcgaatagtttctgtcttccacttttctttcatttgtcttttttctacttcttttattagtgagccgtttttcaaggtcagaggtaggtaagctttttcacccctgtagctgtgcttgcagaaggttcttgaggtctttgcatccctcagcgatgctcttctggttgcggggtaaatgagaactctggaataggtgtttgccacaacagcagtcattccactcaagcaagatccctctggtctcagactgtccttgttaccctcgagttaaaaggttcttttgtgaaatgatgtcgtgttaaaggggttttgttttcttggtttttaagctatctttttaaatgaatgtatctagtacaatgaaaagtaacacaaaaacatcctccagttcttttcttttctctttctctctttctttctttctttctttctttctttctttctttctttctttctttctttctttctttctttctttcttcctttctgttgttgttttctaatggtagcaattcctgaggcttaaagttagggagtcactgttgagttgctggtgattgatgccggggttgctttcagagctctagctgtgagatgggcaagggagcctggggtatctggaccaattcagccctaagaagaatctcccaacagagagtgctctacccatttgcataaaaagaaccataggtgctcgcctttggtggggttttctctatatgcacttggattccgttggagaggaaacacatcttatatttctgtgttgtttgctatcagtgcaacctcatctgataccacttgctttgaagtaagacccaccaccattccaggtggccaagtcattgggtttctactacagtaagcaaagccccaaacctaaggactctgtcacatcacagtagggatcagagcatctaagaccacaagtgttaggagcaagaaatctccatgtaagagcgtcatgtggtgtggcttacactctacatccaccattctttattgaactctcagaagatcagcaagacccatgtggtcactctcagcctcttatatggagagtgggtggttgaggaactagtctgtgaaaagcaagaggataatttacaaccactgggctccgtgcttaatccacgtgaagaatgtctctctaccagagctgcccaccaccactgaggtgatctcttagggccgctgacagtagctcatatgatcacctctatgtactgttgggtgagtatggtacacctatgggcatgcttcctgctgcagacaggcctgtcacacatgtctttgtgtggaagtaagggtaactgccaaccaaacgaagaacacaaagagggaactggtgttcatgtcaacagcatgtggtgggatgcggctgcagatctgtgcttctgcttcagactagagttgaaaataaaagaacccagacggtgggtatttcccactgtggaggagggagtttagtgaccagagcttggacttatgtcatttttttccctggaaataacccacacacacctctctctgcaacacccagttttaaaccagagcagcgttgggccagcccacctcctggcctttcttgtaaaaggcatttctaggaatgcctgcctggcttggctttgtgcctgacttctgtgtctgagtcaagtctcatggtggagttctacatgctctcccaaggcatcactgtgccttagactgagacagctgcctgccctgggactctacagtccttgcccccagcatggtggtggccagaaacagcatcctgtgtgtcactgttgatctagcctctatctcatacagacatgcaaaccaaaggatgcaaagactatcagggggaacaagtgttcctcctacacgctattgtgggctcagtacaggtttgggtgttgcgcaatccagatgcagcaaagtcagctcttgaatccaggttctgcctcatagtctataggaaacctgatttcgtagtgtgtgagtttgggacacgcaggtctgaaaaacagatagaagaagttgctcccagcaaggccgcagtagaggaattggcctgacttctcagcaagatcttaatgagcctgtagaacaattaacttcctgaagactctgagtcctgtgtgcagtcagagctgctcagcgggcttttgcaccaccgtgctcattgcaaactgctctgaggcagtctgtggcttcttccttcacctagacagctctcattcattgctttctggttttgcttttgtgactccagtgttcttttccttgtccgtgcttataccctagtgatttcccaaccagaaggaaacctaccaacaggtaggacctgcagtgggagagggactccagcacacttttgacaaccacagtgtggacagacttatggacaaaggaatgtaccatctggccgtcccctgatgtttaactgttctgaaatcaccttagagtctgtcaaggagtccaccctctgtcttctacaaggaggatagacaccactgtataagccatgaggcagattggagcctaatgtcttgggtctattgtaaaaacaacacaccacgaccaacagcaacatggagaggaaagagttaatgtcatcttacagctttaaatccatcatcctgcaaagtgggggcaggagctgatgcagaggtcatggagaaatgctgcttactggcttgctcttcatgacttgctcagcctgcttttgactaacacacaggactacctgctcaggaatgtccctgccctcagtgagctgaatcctcctacattgaccattaagaaaaagcactacaggtttgcccacaggccaatctggtgaggacattttctcaattgaggttccctcttccaaacatgactttggcctgtgccaggtttacataaaagcagccatcccaggatgctttgtacctaggtgaggtggcctgggcctttcgtccctcagttggtgctggtataaggaagagggcattggctgtcagtggactatctctttgatggtgtctcagggagagatgttgccgagcagcctgcgagtggttctcccagggctgccagcaaagctctggaattctgtgggaacctgacttcccagcctgccacactttatcctggagttctgttcttctaaaacagctctgagacttctgtagctgtctgctggaggctagaagttggatgcagcacttagctttcttcagaaagggagagcttcacagagctcctctcccagagcattctctttctttctctgtgtgtgctcaactgcctgcaactgaatcttgtcctcgctaggatagctacggtgttggagcttggtcagaggcatcatccaggtggctggtttggcttgtagcatgagaaactctgctctctgctgcagccctccaacccatgcctccatgtcatgcccctgtcagctggtagtctgttcctgcactcaccgccccccccaccacctggtcaggtgtctggctcctgagtacatgtgctgccaggtgcagggttttggcaaggacatggtcttacctgcaattggccatttgggaacaagacttcagttctccaagtcctgtgtttacatctaggagtctttttcctggaaaaaatcaccagaaactggtgtggtgtggtatgttgtgctgtgctgtgctgtgctacctagagatgtctgtagctgtcagatgtccttaggtgttggtacactccacttgccgtgacacttgttggcaggcatggatgtgtgtgttgtgtatgcactcatcaatgaaaacgcatcctacctcttgccagcataacccaactgagcttccattctgactcattttatttgtgctgtcgttctgcagggagaattattcctctccacctgtctctcagcctgtcataacccctggcaaatggccagttctcagtgtctgtaggaagtgattgagcacatattcagctttggaggtttcagagctttggaaaccatctgaaggtagaagctacctggtaaaaggttccgtgcctacacccctcacccttcacttgctacatgctacagtgcaaatctctgtccatgtggtgaaaggcacacacatcgcctgggtacttgacagtggctttcctgaatagttgtgtgctgaacaagtgcccagaaaaaaaaagtgacccaaaggggtaagggtcagaataaagaactgtgatgttcaccagcattgcaaactgcagagtttgcaaagcacactgataccgtgtcaggtcgccctgtgagccatcatccttgctgtctaagccatgcttccaatgccacacagagtagcagaacagggttgaaactgaaagttcctctccccatagctgcagtggcatatagcacttcagtggtaagactgagcagggagctctcgagaaatcattatccggactcagggatggcttgatgataaaactctggcaattggaagccttctaagcctcagcacgccagtgagcatggaaggctgagacggcactcgccccaggctggcctggctctcgatgggcagactctagacatctcgggaaatcacagcagcggcttcttttcaaccagtgtgaaacagtaaatgtacttaatgctttttttttatttcataggacaagacatttcaaagaaagcattaaattcattcatgagtgccgactccagggtgagagctgtcttgtacattggtatgtatgactcttgctttgttttctgtcctaagttcaattccagttgaggtcctgctatcttagttgcctttctaatgctgtgataaaatgccatgaccaacacagtgtatgaaacgaagcacttacgtgggggttcagtgttccagagagatagagtttataacggccatgaggatcagcatggctgcaggcagcaggagtgcaggcatgcaggcgtgcatgctgcagggcatggtgctgcagcagtgtctcacatgcatgctatactgctgccctgctcctctggagtccctgactcctctttctagaagaaaactgactggctttgccattatttgtgcttcggtcactgctaggacttctagaagttgttgtcaaggttagtggcacgaaagactggcatttctagcatggcatttcattagaagagcctttcatgtgtcagctggtcctgttaagctcataccaggccccatggtggtcatcctaacgtcctgcttcctcctgcctactctggaagcacccatgggtgcttagagatatatttctatagtatcaaactaacttctttccacttgcccgctggggcttttgttgggtgtgtttggctctagaagtttactttaaagtgatccaagcaaacttagagtaagcattctattgacagtgacccactgtttatcataaagggaaggtcaacattccatatctatgggttccaaactcattatttcaaccatgaatcaaaaatatccaggaaaagtatatctataccaaacatgtacgtgttttttccttgtcctgatttctcagacaatgtaggataacagtgttgtgctggcattgcactgtggtgcactacaatgtcacccacagatgtgcgaaaatgcttggtaggatgtgttagctagcactgtgtactatgcccttcctataagaccgtggacagataccatggatcctggtgtccacagtgagctgggaccagtgacctgtgggcagaaaggacaactgtacatgcacactagtacacacaatgacaagaaaggcaagccagtatacttaataagtgcaaggtctgatattcgcctggggggctctaggtatgtgctagcactggcaatgataataactagcttgcaacgttctggagccaggactctgctgtagtttgaatggagactgatcatctcccctctgtcttgaatgatgtgtgacattaattaactgaaagtgtaataagtcttttgactgagtgaaggcacccacccttgcagcacaagcagtatgaggtggtaactcttggtgctgtgctggtgacagccccaacagaatacaatagacagaaaggccacacccaaaagccatgagcaagtaacctaaaagcagaaaaggagaggagatatttcagtggctttaagaatggtgttttgctgatttatacagatttatgtttatatatatacacatatatatgtatatatattaaataatgtgccaggttttttattttttgctatactgctattttgctttttaaaagttggtggtatagccagtgcaaacaatagttgtttcagccttccattacatttggtttaaagtgcctggggagtgcaattgggagctgttgacatacactcttaaaccccaatccctgggtctctccaggctcctggtgaattaatttatataaagaaatatagcctaaggggatagatttgtttaaaactcccttgcaagttcctaataaaaagccctggtggcaagccagtgctgaagagagaggtttactattgttgtcattagaatactctagacctgatattcgtatcctttaaaaatcatagatttagacttcatctatggtagttaagaaaaccatgaagcctgagctagttcaggttttggttggaagccccaagcccctctctgtgctgcagatatattactgtctgaggaaatagacaatattgagactatatcctataaaaaaaaaaaaacatggagaatgaggccgaagtccctgcagaatgcttgagcccagcgtctgctgtagaggacagcacttggtatgatcctgaataattctctagtaagccttgcctgattccatgaaaccctaaagacagacaggctctttaaaatggggtccctcagatgggtggggatggatctgaagttctcacactgtccttgtgacatgtggctgactctgtcctgcagcctggctggggtctccaggagtgtgacattggtgatcgcatacatcatgactgtcaccgactttggctgggaagatgccttgcacactgttcgtgcggggaggtcctgtgccaaccccaacctgggctttcaaaggcagctgcaggagtttgagaaacatgaagtgcaccaggtgagtagtctttgggagaacttctcaggtgttgacagccacactgggccatgctttcacttcaagaattgtggcacttggaactggaaggcccacacaagcccttgggttcaggattccccctgcatccctcaaagagtcctgcctcctttgtgctcctgcactgtagccacggatcttgggctttgctgtttggttgtacctggtactccatatcagcttgtttctctctctgattctgaattgcaaactttatctcttcctggttttctccctgggttcttttgatcagccctggttatcatgggcagatggcacaagaacgtaactgttccaaggccgctaagtagatgcatagccaacagatttccaagtcatgagctcagatatcagctggttaaaggagcagctatttctcttgcttgctattggctgtcaaccacaaagatgtaattgatgcccaatgaccttttatttccatgttcatatgtggaacttcaccattgcttaagaggtgagagtccctgggaattcatgtgtgcgtaacgctcgggatttccttccaacttttccagtatcggcaatggctgagagaagagtatggagagaaccctttgcgggatgcagaagaagccaaaaatattctgggtaaatataaagagcaagggcgcatggagccccggcctagcagcaggcggtggagcagcttctcaaccctgcctcctctcacctacaataactacacaacagagacctaacagagagagctggtgtctgccttcctgctgcgggtcttctgggttgcctaccatgtgctggtgtgcctggtgtgctggctcctgcctctgaggactacgagaggaggtcgcagcaaggtggagcactcagggctccttctcagaataccgccctactcaggctttttcactctcccatcttcgccccatcttttcctcacctgaacttgcccagcctgggatgctgcccggccaccgtgtacttctcgtatgtgtgcaggcgtgtggatgtgcatgtatgtgtctaagagtgtgcatatatacctacaaatgtatgcattgtgaacaagtacacatgtaaatgtgtctctgcatgtgggcactgagtgtttatggtgctgaaagttataaacacccgctgccagaactgcaatggtcacattgttcagtccacatggaagtcatttgaacttggcctctggaaagctactcaccaagtaacagcttatgcctgtgctgagtgagagctcagggtgtgggcagctggaaacagtggtgttccagattctgagatggcacagaggaagggacaggaccctcctgaggaagagtggcataatcctagagagttttatgtctgtgggaacaagggaggggctttctgagcactgtcttggacttgataagtatacttgccagcccgtcatggccctgagttccactggtgcctgctctgcgtgggaccagcgtcatttgactttcatggtgatatggtatggtgacagggtggacctgagactcagtagccctataccagaggtctggcccacctcctgtctgcttttaaacactttagcctctggcttagcctcttgttgcaggggtctcatctcaggtttgcatgtacctgcaggaactggaaagaaaggcagttattaaactccatagccatttgtgatttaaaatgcctacgcattcactgagctcattgttgtatgctgtggatttgaccgctacctcatgaagttccttccttccttccttccttccttccttccttccttccttccttccttccttccttcctttctttcttctttaaggttgaggtttctttggtaccccagtcaactctgcttcatagttgagaatgtttgtcatgtgactattgtttttgaaaccaaagagaagagcatacttatgtcattgagtgatttaaaatttgcagcttggcttctgtaaggttttctagtgagtcaaaccctacattctgaccatgagagctccttagttcaaagtatgtggcagcaggcacccctagaagctctgcacagtccagtgtccagtcctttatgccaattcacgttgcttaagcatgcaggaccatgcaaatgaaaaatacactcaacctctccctaaacgtactgtgaccaggcatctctgaagcttaagaaacccccaagaagcccccgaggagctggacagtggtggcacacacctttaatcccagcttttgggaggcagaggcaggcggatttctgagttcaaggccagcctggtctacagagtgagttccaggacagccagggctacacagagaaaccctgtctcgaaaaaccaaaaaaaaaaaaaaaaaaaggagaagcccctgaggaagaagcagcaggcctctctctgtgtgtgtggagccctcagggacccagggaaggtgtggttgccagctctctgtgtgcaggccgtgccaagcaatagcatgagtgacgcctgagtacctgagtatgtgtgcacgtgtatgaacagctgcatacctttccataggttctcaactgtcttaatttttgttgccagtaatgttctttctccacagctgccccgggaattctgaagtactgggcctttctcagaagactgtaatgtacctgaagtttctgaaatattgcaaagttcaggctggtgctgccaaaaagaaaagtgatgtaaagtttatttttaagaatccaatagtgatttgtatacttgtttttttttcattttaaaccaaatgcatgtataatcatgttggaatatgttaagatctatggatattctgtagcaagagaaaatatctttgccttaactccactgctgtggttgttccttggacctgaccgatgctcatacaataatctcaagagccctgtctgtttcgtaatagtaactacttctcatgaacactacccaaggaggaagcctgcacctgggaagtgtgcagtgtgagctctgccctcctgttaagttctccagctctagacatgtctcttggtgtgtgttttatctactggtgttattctatatggtagaattaccaaaagctattcagatttcttaataaagggcaaatcaaccaagcctgacatcatgtgcagtgtgttcttttgtgacgtgcaaaggtcacatgtgtttctctggaggatcccagtgcacctagccttggctcagaagacatgctcctctcgagaaggcagaacagcacatgctaacataacacacaacataacacactgatgactaagggaaaaactgtcctggggctgttggggctggagctggagctcagagtaacaccctcaccttgtgtcttccctccttgcaccaaaaagaaactatggacgtaaagaagtcagacacggtgagactttccctgcagaatgaacactttgagtctttggtctctcaggggtgagtgcgcgtaccacagggatacaccgaacaggtagtccacagactcatttcaaattcattttcagttcttaatatggaggaacgcaaaactcaattgaagagcaatttaaggccagctactaaatttccctgtctacatctggtaaggtttagcttaaaggaagggcagatgatattgggatttaatgaacatgggcttgaccacatgtaccaggagctcctggcatgctcacaggtagtctccttgtagaaacctgacacatttttgtgtgtcaaacaaggagccttgaacatgtctctcaaaccatctgtaaagctatggggaccctgaggtggcagaagccaggcacatgacagtcccaggagagccatcatgcctacgtaggggtaagaaagcagagcaggaaaacaggttccttgggcacaaagcctgtccttctgagccaataggacttgtaacccaatgtcccttcctgcctgtttgtcaccacgtaacaaacttcgtaaacttagattaggaaatacttcactcactgaaggttcaagcctgaagcctgcacctaccctcacggtaagtccctggggagcagcagccttgcttttgtcaggggggctccttgggtgcagccttgacctgcttacactagaagcctgggacatcctcttcacgacccaaccaggtacttgtaggccatgctgaagatgacacccaagacctgcacacctttgggggtacttgggcttgtaagatgagctgggtcgtgctccagtgcagtggctctcttcagacacagacctgctgtagcctgtaacatagagtcagtgtccacaaagggaagcaggatccgcctcgttagcatttgtctttatgacagctggccctaggacagtaagctgcagtagcaccggacagcaaaggaatgggcaagaaccagtgcagccaccccggtgcagtgtgggagggagcttagggagacaggagtgttaaggggggaggcatcctgaaaccagtgaagcctcacttgagacctgacatgtaagtcagtgtggtgtgaaggaatgagaacccaaactgaggctgcacgtgtggggaaacctgaagggagagagctcagcactcggactcacaagccatccccagtgactacagagccacagtgcagaggcagtgttgagctgcagaccagactggaaaaggcctgtctaagactggtacaaactcagattcctaactggaaatgctagggactggaagtgttttagctttggggtggttccctgattacagcattttcataaccctccataaatctaaagttgagttgcttcatgcgcaccttgagcacacatacatatgacatacacagaatctgggggtaattgtttcatacatcattgtcagcacatctgtgttttgacttttgcttgtcacttgagatatcaagtatggaatttttcatttgtggaaaataccagagctcaaaaaaagttggatttggaaacagtgtggactgcacgtatcaggttgaaagcaatctacctacagtgacagccagttgtcactcacagagactgctgtgcacgtgtgctccttgacttctcagcccagtgtttctccctggtctgttctcatcccctgtggcttggtccagaggagctgagtactacagatgcgttcctgacaatggtgatgaggaccaccaagagggcaggtagactggagttgacagaaactacaagcaacgggaattcagtgactgttgggaaagtgagggttcgggtcactctctgggagcttactgccaaaacttgttccttggtattctacactacctggttgtgtgagcttctgccatgtccaggctagatgtaagggggatgctgaagaagaaactggcagatctccaaggaggcaaacagctttgcagagcaaatactcaggcctgcccactcacctagaactcagccccaggagccagactcacaaaccttcctgtacaagtcgctccccaattccctcatcattgagagagacactggctttttccttgccgagttattggtctcattgtcagaacttctgggagatcaactcagtccttgagctactgattgtcagcttcacccaagatgaggtcacctggggagaaagtacctcatttgagaaaattcctccctcagattatcctgtagctctgtgggggcattttcttgattaatgattgatgtgggagggcctgactcactatgggtgataaaagccctgggcacatggtcctgggaagtcttaagaacgtaagctgagcaagccacggagagcaagctagcaacgttcctccattggctctgcttcagttcctgcctcctgataacctaccagctcctgccctaacttcctaggatgattaactacaagctttgagatgacattaaaccctttcctctccaagttgcttttggtcatggcattcatcatggtaatagaaaacattaggacagggctgtagagcaagcatggagaatcagagtgtgagcttgtgagctacagcccttgccctacctgatctggctgtataccctggcaagagtgctgctgacacagccagtactgagcacagggaagacctgcatgtttcctgaaggctccatctccccttgctaggcaaggctgctagctccaggaagacatctttggtgggtttccggcagatcacctgtgttcataccacatgctctacccaggatgagttgacagtaagttgtgtttctcagagtactaacctgaaactttggcatttgcacctttccttgaggaaaagatcttcgcagtgaacaattctttcttgtttctgtcttggcaggagacctgttagttatccacagatgaactcgggtgatggggttgggggagagcctgcgtgcactcaaggtatttgggttttattggtactttttgtttattcatgtcaaagaaattcttaacctccaggggagtaacacgtgccaggcatgtctaagacatgacaagctcaaatacctggacgttcaggccctcggttccttggcacctggcagtggcttggggcgtctatgagtccatattccacagtcagagctggttaccaactatcattttgcatgctagcctctgatcatagaaatagggaacacacagagagtcacacccttgccatcccacatcagctggctcctcccatcctgaccctgagttattaataattttattaagaatgtgctttcaacactcttgtatatatatgtacttagcaagaattcaccaagactgcaaagggcggttccgcttcccttattgccagagaaagggagaaacaagaagcactgcctttgactccttacttggaaacatctttcctttttttcccattcagtggcatccactggtcctcaggtgcagaggaacacacccaaaggcgtggacagtgttatagacagcaccatctcatgccccgaggcctggtcactttcttgtttccctgttgcagctcaagaccttgagacctgtgatgccaagaaacagcgtgagatatgtccctgtcaggtctgccagtatcacaaattaccgtcacttctctctgcagctcaggctcaagaggctgcaggaaacatctgatgatgctctaagcactgagcccgcgtctttccatcatgggaaagacttgccagcacatgttcgaacatctgcgagctgaggtttattttggctccaggtctctatgcaaactatcgatcataagagttagtagctcacagttaattttcctgaaggttttagttcaggtattagaatctggccaccaaaagggctacttagcaggtgtctgaaagtgtgggcagttcaatattctaattgcatgaggtggtggctcttgacttagaagctgggtgactataagaggagtttggaatggattgttcatgtatatacccatgtgcaacggtctgtattttaaaatgctgtcaaagcctgggaaaggaagggcctttctggagcaattccttcaaggaataatgccctttggaaccattctagttggccaggctgtctggcccaaggaaccagaaaaaaaagaaaggactgtgccttgctgctcagcacacatccagttatacactccgtgtgcatgggcacatgtcagaagcaggacagctcactatctctcctctcaggatcctcctatggttttctctgctctcagccttcattcttatccccaggagctgctaaggttccagacaggagcccagcgttctggtgcaccctggggaaacccagagcgccactcaaaagccatgttggaaaatgaaagtcagaaagctttctatgtgcatcagagaaatgctaccttctgctttgcaaagggcgttgttcatcatggctccaagcctgaagggtacacatctcccctgtcatgtgcctgggcccctaggctaggatcctctttggccttgtgggaagccatcctgaggtggaagagggaagataagtgtgagaagaggggaactttactcagctgtggatgttggccccttgcagactgggctctgtctgacagcatggcatgccatcccacaaaatgccctgttctatgcattcagagcctcttccagtcacctacattcctcaggaaggagaggcaggggtctgaggaacacagctgtgggaaagtgcttccttagcaggtggttcaaggctttcggtgtctgaccagaaaggtctggcaatcacagaccagcttggatgaggcccagtttgatccagttctctggaacacctgggggagtcccagagcaagccacccattcatgtgaggaaattctaccacagacgggtgcagcaaaaattccttataagacacaagagaggggaggactcaaacagtgtcctgtctactggacaatgatgtggccagaaccagcttccggggtactgtttgtgtttgtgaattctctcgttcctaagcaccttcctccagatggccaactgtcactgaacattaaatgtgtgccctcagagtgatggttgagactttttacttttgaaaaatcgccatgccactcttgtgagacaggccttactagcatcctcatttaacaaatgaattgaattgtagtgacaccgccagaagacagtgaggtcatagttgctggctagacgtgctctaaatccctagtccatttaaaatgccaacatcatctgggggtgggggagaaggtgactcttgccagcaatgtccagctgcacaggatgccccctgcaggaagacagctgccttatgtggggtggggggggggcacttagctccagaccatcaacagagggctttctatgacccaagttccgttatttcgacaaaataaggaatggactgcagaaacttgaagactcctatcaggaggcagatcccttcagacgaagggatggtcaccaaagacagggccaaacgaagcagggactgcttgctgcagcagccagggtctgccaagaattccttccacccctgtgtccaaggggaggagctaagtgtccccagagagatatggcccccatgtagaaatattcacaggctgccccttaagaagtgcagtgatcccgaggacctggacgggacatccactgtgccttgcccgcctgtctgtttggtctgagtgtgattagcaagtatagtcagagatttggtagttgctgccagcttccaagaaacacctttagagtcacccatccattaagctaaaagtgatctggggtgggggtggggtaaggggctctggtctgcgatgacacatttgccctagaacgctccaatcagagcttttctggtcactgctttccgctttagaaagcattctagaagcatccttagttgtcccccacaacctgtgcatttttttacagcctgtttggagaagtgatgctcttcaatcatggggccatgcactgcgctgcatcttccctaagagtccacccttttacagagtaggggagagggcggtctgctgtgtctccatctctctaagccacactaggtacagtctgccacaagggtaacagactttgtaaacagtctgactagagtgttttatcacatgagcatatactaagctcaggatgtgagcacaagcccagggcccttgggacaggtgctgaacacgaaagtggaaaacttggaagaagggtcaaaggcgaggattgtgggtgtggatcatgtgagccaagggagagccctgcatccttggactgcccttggacctggcaggaagtgactgtgatccacaggcaagaagggggacaaccgaaggggatttctctgtgtcccttaccatcttccactgtgaccattgtcacagagcagagcgtcagatgtacctgccatacctctctgttcacaggctccttcacgacaaaggagagaagcatgcactggcttgtgcgttacatccctgtaaagcccccttttgtggaaacccagctaattagtgatttcctgggatgcctacctccctgttttttaatttacttttattagagctctccagatcgtggaacttggccagctggcttcatctcattgtttctacagagagaaaatgcagagtctcgacttttcatgcttctgaccccatcctcagagacaactgaatatcactggtcattttggagaccttggtgagatcgctgctgttgcccttcgtggggctcctgtggcttcccctccatgaaaagagccaacagaggaaagtctagctgtcacagaaaggaaggctagcccttagcctgctctttttctcaaagaattcctattggtgtggttggataatgttggtcccttgaacattttcagagccatatttagaatccttctgtgtggatacagtttactaagactgccactcccatcacagaaatagctgatttctttttttgtgattcctaatcattaaacattcactcctgagctgggaactgccctgcatatgcctatgctgtaaggctccagccttcaggaagacttcatgccccatgatggcaggacctgggtcttaatcacaacttagagtggcctagaacagaagaagggctcaacaaggagttccatgggatccatgccctgcccccttcacctattgtcagttagggtcattggtgccctaatggtggaagtgtgccagatcccctggactgttttggcttatttggttggttggtcggttggttggttggttggttggttggttggttggtcagttggttggttggttggtcggtcggtcagttgggttggttaggggtggttgttgtgattttgggtttcatttgttttgttaatttgtttgtttttgtactcctgggagcatcagagaaaagcctggtaccatcagccctattttagcagccattctggctgggtcttccccaggcctttgacccagacctttgacattattcttgtcactgtttactcggacccatgtgcttatgagtgagagcctctgcttcccactgttcattcaccacccttcccacaatctgctcacaatttgctgtggagctagctgttgacaaaagttcactgtggcagttcccaaggtcccttgaagcagcttttcctttagcaatacccagagttctgctctgttgaggatctgaacagacacggaagcacctctatgtacatcaccccaaagccaacacactgacagccaggaccagactggcttcttgaagatcatatagcagggtcacttggctcccaggtacagagctgctcacagtatctttcacccagggctctttggggggagggggaggggagaagaacttgcctctgggtttcctgacctgaactttctggaactactcagacagggacattggaatgtgacttaggtcaggttcataccccagtagacaggatgcctggactggcccccacaccactgccagggagaacaataccctggctgtgttttaagaatttaaagctatccaacctaaggcaaagccttcaaacttaactgaaaataattgtaaaaccacaatggatgtcctccaacctcagaggtgacatcactttgctccaaaacattgaaaaccaaaagctctagtacctgaaaaaaaggatgaccttttcagagagatgcttgggtaggaaaagatcccacataaacctctccccccccgaaagtgcccactcacaggccagaaggggatcaatgtggcacctcacaactctccatgtgaagttctttccagcgtgacctctacagcttacagttataaagctgacagggaggcaggaacatgagccttgcttctgggctttatgagagagacctttgcttctaaaccagtgaattctgcccaaggagacagggccaggaagtgaagagacgtgtttttcacaggcagtgcatgggagaagctgtgctgtgtggcgcccgcagcacctgttgatcactgcaaatcaagatgtctttgtggcactccccggaaagctgaagagatccggtgaattagctgatgtcctctaacttcagatttccaagtcaggcctaatcagaaatgtttacttaatcggctttttctaaagtggttctaggtgctaggtaggctcttagctgcttcccccttcatcaaacagacccagagctacaggcctcagtttgctgagccagggaatggggccagccttcctcagtttcagtaacatcagatgggtgatccacaagagaagaaagtgtcttttctgtgtgactgttaggagtctaaacatcctaacatacctcttctcttcattgaccacacagtttccaactaaagagatgaaatgaatttgccccagtaacctttttttaaccccagactttaccaaaatgaggtcttgggaaaatttgccccaagccccagtttctgaactgtttctcgctttgtttagggattggactgaagattctaaaattgcttcatgttccctctcacggggctgtgtcttcagtcaggtcagtgtctatagccaggctagggaaaaggctccaggaaaaaacacagacacagacacacagacaggcagatagacagacagacagacagacacacacacagacacgtgcacactcagagacacacagagacaagtacgtgtgcacacagatacacagacacacacaccccaccactctcccaccttgaatgtctttgtagtgatcttgacagcagctaatgttctccaaggagactgctgctacaccatatataaggggagtccctgggatttctttgaataatgtcagcagctgccatttaaaccaaaggacagagaaagagaaaactgtgtttggggttgtttttttgttttgtttttatcttgctatggcagaggtttgaatggggaaaggggaattctgcatgatttctaacatttttcccctttagataccatgttatatcagatctactggaccactggtttgaattaattaacatccccacagaatacagactgcttgtaagacccacccatgctagtggcttgccaccttcctggccatgttgaacatgagtgaccatgcatacagactattttccatagaaagatacaggccagggctaattcaacagcccgttaggttaca

SEQ ID NO: 279 - DNA, 1161 bp, Mus musculus
cgcgtcccgggtggagcgcgcagcgagcgccgccctggcgccgcctcccgctgccccgcccgcctgcccgcccggctgcgcgcccggtctcctcccgcgagcgcggagcggcgagcccggcgcggccatggggagtgggatgagccagatcctgccgggcctgtacattggcaacttcaaagacgcaagagatgcagaacagttgagcaggaacaaggtgacacacattctttctgtgcacgatactgccaggcccatgttggagggagttaaatacctgtgtattccagcggcagacacaccatctcaaaacctgacaagacatttcaaagaaagcattaaattcattcatgagtgccgactccagggtgagagctgtcttgtacattgcctggctggggtctccaggagtgtgacattggtgatcgcatacatcatgactgtcaccgactttggctgggaagatgccttgcacactgttcgtgcggggaggtcctgtgccaaccccaacctgggctttcaaaggcagctgcaggagtttgagaaacatgaagtgcaccagtatcggcaatggctgagagaagagtatggagagaaccctttgcgggatgcagaagaagccaaaaatattctggctgccccgggaattctgaagtactgggcctttctcagaagactgtaatgtacctgaagtttctgaaatattgcaaagttcaggctggtgctgccaaaaagaaaagtgatgtaaagtttatttttaagaatccaatagtgatttgtatacttgtttttttttcattttaaaccaaatgcatgtataatcatgttggaatatgttaagatctatggatattctgtagcaagagaaaatatctttgccttaactccactgctgtggttgttccttggacctgaccgatgctcatacaataatctcaagagccctgtctgtttcgtaatagtaactacttctcatgaacactacccaaggaggaagcctgcacctgggaagtgtgcagtgtgagctctgccctcctgttaagttctccagctctagacatgtctcttggtgtgtgttttatctactggtgttattctatatggtagaattaccaaaagctattcagatttcttaataaagggcaaatcaaccaagcctga

SEQ ID NO: 280 - protein, 182 aa, Mus musculus
MGSGMSQILPGIGNFKDARDAEQLSRNKVTHILSVHDTARPMLEGVKYLCIPAADTPSQNLTRHFKESIKFIHECRLQGESCLVHCLAGVSRSVTLVIAYIMTVTDFGWEDALHTVRAGRSCANPNLGFQRQLQEFEKHEVHQYRQWLREEYGENPLRDAEEAKNILAAPGILKYWAFLRRL

SEQ ID NO: 281 - DNA, 821 bp, Mus musculus
cgcgtcccgggtggagcgcgcagcgagcgccgccctggcgccgcctcccgctgccccgcccgcctgcccgcccggctgcgcgcccggtctcctcccgcgagcgcggagcggcgagcccggcgcggccatggggagtgggatgagccagatcctgccgggcctgtacattggcaacttcaaagacgcaagagatgcagaacagttgagcaggaacaaggtgacacacattctttctgtgcacgatactgccaggcccatgttggagggagttaaatacctgtgtattccagcggcagacacaccatctcaaaacctgacaagacatttcaaagaaagcattaaattcattcatgagtgccgactccagggtgagagctgtcttgtacattggtatgtatgactcttgctttgttttctgtcctaagttcaattccagttgaggtcctgctatcttagttgcctttctaatgctgtgataaaatgccatgaccaacacagtgtatgaaacgaagcacttacgtgggggttcagtgttccagagagatagagtttataacggccatgaggatcagcatggctgcaggcagcaggagtgcaggcatgcaggcgtgcatgctgcagggcatggtgctgcagcagtgtctcacatgcatgctatactgctgccctgctcctctggagtccctgactcctctttctagaagaaaactgactggctttgccattatttgtgcttcggtcactgctaggacttctagaagttgttgtcaaggttagtggcacgaaagactggcatttctagcatggcatttcattagaag

SEQ ID NO: 282 - protein, 88 aa, Mus musculus
MGSGMSQILPGIGNFKDARDAEQLSRNKVTHILSVHDTARPMLEGVKYLCIPAADTPSQNLTRHFKESIKFIHECRLQGESCLVHWYV

SEQ ID NO: 283 - DNA, 1111 bp, Mus musculus
cgcgtcccgggtggagcgcgcagcgagcgccgccctggcgccgcctcccgctgccccgcccgcctgcccgcccggctgcgcgcccggtctcctcccgcgagcgcggagcggcgagcccggcgcggccatggggagtgggatgagccagatcctgccgggcctgtacattggcaacttcaaagacgcaagagatgcagaacagttgagcaggaacaaggtgacacacattctttctgtgcacgatactgccaggcccatgttggaggacaagacatttcaaagaaagcattaaattcattcatgagtgccgactccagggtgagagctgtcttgtacattgcctggctggggtctccaggagtgtgacattggtgatcgcatacatcatgactgtcaccgactttggctgggaagatgccttgcacactgttcgtgcggggaggtcctgtgccaaccccaacctgggctttcaaaggcagctgcaggagtttgagaaacatgaagtgcaccagtatcggcaatggctgagagaagagtatggagagaaccctttgcgggatgcagaagaagccaaaaatattctggctgccccgggaattctgaagtactgggcctttctcagaagactgtaatgtacctgaagtttctgaaatattgcaaagttcaggctggtgctgccaaaaagaaaagtgatgtaaagtttatttttaagaatccaatagtgatttgtatacttgtttttttttcattttaaaccaaatgcatgtataatcatgttggaatatgttaagatctatggatattctgtagcaagagaaaatatctttgccttaactccactgctgtggttgttccttggacctgaccgatgctcatacaataatctcaagagccctgtctgtttcgtaatagtaactacttctcatgaacactacccaaggaggaagcctgcacctgggaagtgtgcagtgtgagctctgccctcctgttaagttctccagctctagacatgtctcttggtgtgtgttttatctactggtgttattctatatggtagaattaccaaaagctattcagatttcttaataaagggcaaatcaaccaagcctga

SEQ ID NO: 284 - protein, 52 aa, Mus musculus
MGSGMSQILPGIGNFKDARDAEQLSRNKVTHILSVHDTARPMLEDKTFQRKH

SEQ ID NO: 285 - DNA, 1174 bp, Mus musculus
gcgcccggtctcctcccgcgagcgcggagcggcgagcccggcgcggccatggggagtgggatgagccagatcctgccgggcctgtacattggcaacttcaaagacgcaagagatgcagaacagttgagcaggaacaaggtgacacacattctttctgtgcacgatactgccaggcccatgttggagggagttaaatacctgtgtattccagcggcagacacaccatctcaaaacctgacaagacatttcaaagaaagcattaaattcattcatgagtgccgactccagggtgagagctgtcttgtacattgcctggctggggtctccaggagtgtgacattggtgatcgcatacatcatgactgtcaccgactttggctgggaagatgccttgcacactgttcgtgcggggaggtcctgtgccaaccccaacctgggctttcaaaggcagctgcaggagtttgagaaacatgaagtgcaccagtatcggcaatggctgagagaagagtatggagagaaccctttgcgggatgcagaagaagccaaaaatattctgggtaaatataaagagcaagggcgcatggagccccggcctagcagcaggcggtggagcagcttctcaaccctgcctcctctcacctacaataactacacaacagagacctaacagagagagctggtgtctgccttcctgctgcgggtcttctgggttgcctaccatgtgctggtgtgcctggtgtgctggctcctgcctctgaggactacgagaggaggtcgcagcaaggtggagcactcagggctccttctcagaataccgccctactcaggctttttcactctcccatcttcgccccatcttttcctcacctgaacttgcccagcctgggatgctgcccggccaccgtgtacttctcgtatgtgtgcaggcgtgtggatgtgcatgtatgtgtctaagagtgtgcatatatacctacaaatgtatgcattgtgaacaagtacacatgtaaatgtgtctctgcatgtgggcactgagtgtttatggtgctgaaagttataaacacccgctgccagaactgcaatggtcacattgttcagtccacatggaagtcatttgaacttggcctctggaaagctactcaccaagtaacagcttatgcctgtgctgagtgagagct

SEQ ID NO: 286 - protein, 203 aa, Mus musculus
MGSGMSQILPGIGNFKDARDAEQLSRNKVTHILSVHDTARPMLEGVKYLCIPAADTPSQNLTRHFKESIKFIHECRLQGESCLVHCLAGVSRSVTLVIAYIMTVTDFGWEDALHTVRAGRSCANPNLGFQRQLQEFEKHEVHQYRQWLREEYGENPLRDAEEAKNILGKYKEQGRMEPRPSSRRWSSFSTLPPLTYNNYTTET

SEQ ID NO: 287 - DNA, 109051 bp, Mus musculus
  misc_feature (1)...(109051): n = A,T,C or G
ttttgaaaagtaaaaccagcaacaatcttttacaaagtatataagcacattttaaattttgaattgaaaacttagaactacacctctctttttttttttcagttttcttttcttaaagaacttaagtgatacaaattccaaagacaatcttcaaagatcaagtgatgctccctaaaataactcagagaaaagctatcttaaaaagaaattacatggaccagagggccaggaaaatgagtggaaatatttggctgacagaggtgggaggtgggagtggggggagaaagtcccagagaccgggaatgtgagaagctcccacaactcaatgtgggtgaccttcactgaaatgcccaacgggagatggaacctaaagagactatttctagtagttagacagggctcccagtggagggatggggacaccaacccaactttaaaaatctgatccagaattgttcctgtcaaaaagaaatgcaggaacaaaaatggagcagagactgaaggaatggccaaccaatgaccggcacaacttcggatccatccaatgggtgggcaccaaaccctgacactattactgatgctatgttgtacttgcagacaggagcctagcatggctgttctctgagggacactaccagcagctgactgaggcagatgcagatacttacagccaacctttagactgaggttgggtaccccttaggaagagttaggggaatggttgaaggaactgaagggggtggcaaccccataggaagaccaacagtgtcaactaacctggacccctgggagctactaagttaccaaccaaagagcatacatgggcaggtctgagggcctcagcagagaatagccttgtctggcctcagtgggagaggatgcacctaatactgtaaagacctgatgccccagggaagggagatgggaggggctgaccctctcagaggtgaaggggagtggaggtaggggatgaaaaactctgggagagggtactgggaggacatttgggatgtaatttacccatttttctcttatcttgatgccactcaaatgtaattcaagctaattttttttcctggtttttcaagatagggtttcactgtgtagccttgcctgtcttgaaacttgctctatagaccaggctggcctcaaactcatagaaatctgcctgcctctgcctccagaatgctaagattaaagagccatcaccacccagcattaattgaaaaatttcaggaaaaattctactgtaaatatgcagtgagtttttgaaatttaattccttaaaaatacacatttttttaggctgaatggacagatcagtgaataaaggcacttgccatgcaaccttggcgacctgagttcagtcgtcagaaagatataaacgtggagaataccaactcttaaaagttgttttctgacctccacatagtcacacatatcatacacagagtatatcatacaataataataataataatttaaaaattaacaataagatgatctgcatgcttagtacagatcgaaaccacattttaattagttttttcctatttggggaggtttttccacagaacttgtattagctaacgtcccatgctacaatgcttttgatatacatgagggaagacaaataaaaacaaagcttaaatgttatttttcaatcatacacaatacattaaattgtattcagttttcaagttagctttcaaaaattagttctggcattttaaaatagtgtaaataagcctacacttatttatgtattttgtgtatatgcatgtgtgtgagggcccatgcatgcatgtgcattcagaggccagaggataccttaggtgtcactcttagaggacatccattatttgaaaatttgagacagggtgtgttacagctcagatggaaaggtatcctagcagttgggtgccaggaaattctacaaagtcacactgtacaacaaacctcacccaagagatttattgggagggaaaaaccctggagagtggctgcctctgctcaggtgagaagtagcagaggcctgagcagaaacagggcttatacaggatttcttgggtggaagtagctttccagggtgcagctttctagggtggagattttcagggtggggattggtaggattccaagtccagaggttaaggtttttactctgtaaagccagagttggatctgccatcagggcagttaaagagtgttctgtggtggggccttgctgttggaggccctcaagggggttgcctgggtactcatgtgctttgatggtcttacacagagtctcttactatcctggaattcatcaagtaaactaggctggctggctgggatctacgtgtttctgccatctcagtgctggattatagctgcacatgatcatacctggatccctccaagccctctcacatactcctccttgctcttcttcaaataaccacccagaaggtgcctaatctcaactggcattttttacgttggttctgcagacccaactcatgcttacaaagaaagaactttactgtctaagctatctgatgagccagcatttattagacttatttgaatctttttaatatattgatttacattttcattttaaacaatctaccagcaaaattaggcagcatgccgttatatggatatactagtgttttattttgatcatactcataagttaattatatatgatattgagcttttataaatgtatcccatttatacattttttattttgttgttaaattcttacattaaataaaatgaaagtatgccagaaggaatgctttgaatataatcacacaggcttcaacaacatgcagattttgacatgaaaacaataaaacacagtcctgctcaaagatctagaacaggtgtaaaaaccacacaaggccacggctttgcatacatccttcccgtgcttcctttgaggcttcagtcattgctctagcactttgccagtcatttggtatttgatggtttactgggttgacaagaaaatctgacctaaaattttttgtttcgcaaaatttaaactataatttttttttgcacttcatacttagtttcacagtcagttccagtgctatttattcaatgcccctttgaagtctttgaagtcttgtcaatggtgctcttgccattcttcacttatgcttccacatgaatccttacaatctcattgttaaggtgtgagggaaacttagtaatttggcaaataactgttctatagatttatctttaacatattggctttcttcccatgacaggtctctctttattggagattttcaagttttagtattatcttacaaacatcttccatacatttaaacctatttactataagttttgttaatatgtgtaaaaattatttgaaattatattattaaatgttttgctgctgaataggaatatagttgacttgtgctcctcaataatcctcttattctaaacatttatcaacattttctcattttatacatggctgaaaatcttgtttatgaacaataatttgcttctggtatcttataacttacatccaacattggtttattagaatgattagtacaacattgactagaagtagcaacagacatcagagtcctggttttagatggaaactagatccttttaaggatatagacatctaataaactctggcataaaatcgtttctggtaatcacttgtatctttagtatctctgaatactccttggtgtttatcctactttttatttctaatatgtgtctttttttcttccactaattgttatttttgctttgattctattcttagtttcttttttttttttagtttctttttcaatgtaagcattccttatcttccatgaattattacatacaaattttgatatgtagtatttttattaatcagctttcattgatgttaaaacagcaggactcgggggatgaacatgaatgagttcatttattcacatgatgctcaatcaaaccccactttgagagccaatttttctccatacccttgaaaggaaagtagaaaattccttgattctttggccagttttcttcaccatcaccactaccaccaccaccaccaccaccaccactacctgtggtcacttctagccactaagaaagagacaaatggccaaaaagttcagtttggtaattgctaagtataaaaaataaagacctcaatattcatttagccttttagagtccagacttgccctaagttgtttacggtgagtatgtgggggttattgcttcattatatgacttatgctttgtctgtgctcctacttcccaggctgtttctaacttcctcaggattggtttgggagataaaggagtagcaatgatcttccatgaggttgtataaatctaacacattcttcatcctggacgctcttttatattcttcagattcactacttcctccccaagaagccagttgtccaagttctcactggggtcatcttgaaatctctggctttcttttacctatgactcacatctcttccaaaggaaatgtgcatcttgtcactataaacgctgggagtgagcctgcctcaaacacatgaatatactaaaccttacaacaacaaaaccttttcttacttaaattgttttcatctctttaaggctttctgcattaaagtttactttgtcaggtctactatcattatgaggtactcagcatttctttattccccttgattttactctcaatcttgcttttattttatttacacctgtcttgtgacaagcagctggatttcattttcattgaatctttaggcaaactcaatccagcatgcctgttctttttgaaacatgtgggttgacttgtactattggtgttttccattaatcatagttttacttatctttccctgtctctgctgtgctagtcagttttcttgtcactgtgacagaatgcccaattgaaaaatgtggatttttttttttttaactccaagttgcagttaggtagtcattggctctattgttttcagggtcatggtgaggttgaactcacagcagtagaagccttcttttctctgtgggacttgtttcattttatgaaggacagaagcagagagagtaaggagaggacagaagaccagacataaccttcaaaggcatgatctcagtgacctacttcctgtaacaaagctccactccctaaagtatccagagcctctaaaccagggctgccagctgtaaaataattcagcagctcactgtgggggagacatttcatatttattctataataactgccttatattgaggtaatggaattttagcttttcctattgagaacttgtatacccctttagtatcccattacattaattctgacatttaacatgcattcttcatcagaagtttaccaatttctgttcctctttccagtaaaaacctcttttaatactttgaatgctgtcactgtctgtgcagctttctattattgtaacaactatctgagataacttaaaaggagggaatgtttggttcagttttggaggtttcagccttgatgatgccttggccccattgtttctgggcctgaaatgtcgtaacaggggtgcatggtacaataagctacttacctcacagtgttcacaaagcaaagagagaaaggggagagactgggatctcagtagctcttttaagggcatgctcccagtgacccgagtcctcccactagcttctagttctttcttacaagttttcacctcccagtagtgccaggttggggaataagaatttcctacatgagactttggagggtatgcaacacccgatctatagcactgtagtcatattctatattattatataacattcttattttcctttacttttatatattcaaattgtttctattgttgctttataaggccagtgattgcttaccaattttttaggttaattattcctttttatttggtttaatcctttaagttcgaaattctttaaaagactctctagtgaaagcccattggtcttgtttgataatattatttgctttaattaaaatctaggttggcagttatcttcctttggcactttgaagtcacactcccattgtctcttggcttcagtgttactatggagatggctgcttttcttggtgtcatttcattgagaggtaatctgacctttttaaagactctcaagaatctctgctactttattttgtaaattttacttctgtgtctggtgacacattttatttacatgcacactcttcatatttctctctaggtttttgaacttttgcactttatttggggtcattccttcagatctctcagttcgtaattttctgttaagatgtttcatatgctctttatctcactactacagtttagatgccagtaactgaaaatttcatttccagagtctttttaaaattttatcttgaaggtaagtgtcttttcttttcctccttttccttcctttttctttttgaaacaggatctcactgtgtagctctggccagcctggaactccctatgtagaaccagactgtcctaaaatttagagatccacatgttctgcctcctgagtgcagaaattaaaagtaatatatgccactatgtttgactatctggtactttttggtgttttatttatcctcatgcttcctggttagtaattttaaaacatcaataaatactttagctacagtttaaaaataccttttactctaataatggaaactactagggttctacttctgttgcatattttctgtactggatcttgttcatgatggcttgtttttatttatttgcttgaattttgggattgtaaactgcttgatagggctttatttctgaggcctgagacatgataaacatggttctcttgaaaggatgtacctgtgttttccagctacctgggtgcacctaatttggtagttattgttttgggattacttagatggtatgaatcgtgcaaatgcaaatcctaaatctagctttagatatagaaaagtatcatagaaaatcaacagcattcatgaaaaaaggtgcttaaataggcacatccttctctttttttgttgtctaggaaatccccatttatatgtgtagacatgtacatgcaaatatacgtgcatgcacacatggaggttgataatacatatcttccttgatcattctctaccttatcctttgagaggctgtctaaaaccagagccgaccgaatgactagctagcgagcctaaggaatctacctgtctctctccctccaaaactagagtcagggttataggtacaaacacccatacctaggctttgtgtacagatgttggcaatctgacttcaggtcactttactgaccaaaccatcttctgacactagttcttgtttagctgtagaattttcaggcttattatctgacatgagataaaatactacatcaaagtagtacagctttagtttttcaaatctaaaaatctcttctgaacactattttatagacatcatatgagagtaagtcaggagggctgggaacatagctcagtgatagaacacatgtctaccacacacaagacctttcgtttgagacacagccccatatatctcaggctgccctcacacttgctatgtggctgaggatgactttaaactttgatccttatgcctctatatcccatgtgtttgtcaccactctgtttatgtgactctggggattgaacacaaggttttcatgcagggtagacaagtactctatctaccaacagcaccaacccttgatttgtaaatgttaacatttaatttacttattggcaaaggatatagatctacttcatttcttttctcttactattacttaacatcttcttccatctaccttatatctaacaatatatcaagaaaggctacaacccaaactcacctaacactcttatgttttcatacctattgtttttcatgagatttttgataaatcctttttttttttttttttttttcgagacattttttttctgtatagccctggctgttgtcctggaactcaatttgtagattaggctggcctcgaactcaataaatccattattttaaagatttatcacataatatatatttgccttttatgttgtgaacataagtagaaaccaattttaataaagtattgcagggttaattatattaaaagtctctttggcatccaagtaaaattcttttgaaatgcttatcatgactgttattgggtgctagatgttgagcctagggtctcatgcatatcaaacatgctatactacagttatatttttgtagtctaaattgtcttaatttttgctgtgttatcaattgtcagtggttttgcatgcaatatagtcaatccaacaacacttatactgacttcagaaatatatcacaatttcaccttgaagtaactggcatcctagtgttggaggtttacaacatcagcatccacacaagaggatgacaggcaaccgacaagaacaaaagctaccctaagggcaggatgcttaacctttaagacatgttcatgttatgactgttcccatttcattaaacaggacaatcatggcaatgcagttacataagagacactcaaaggtgaggagtcgtcttgttagctagaaggatattcctttaacaaggtgatttctttcatttcaatgtttattttggatttatcaaatcacttgtagtttcagtaaggccttacatcttaaaccaacaggcaaaggccagcctggtctacagaatgagttctaggatagctagggctacgcagtgagaaggcctgtctcaaaatccctgcctccccccaaaatttatttaactctttattttttgcagttactcccctttactcaggctgttgttactagctaaatcaatattcctaaatgtttctctttataaagcttttcctattgctttgcaaacaagtgacactcttaatatagcactcctttgaaaatagtctactagtcttagtagtatctgcaaagaatggagatctctttgttgaataggcatatagtatatacaaataagatcctccagtaggcaggataatgatccccaagaggaatttgtgtctctaaatccaggaacccatacatgttatcttacatgtcaaggggccttttctgatgtagttatgagtgtacacctgaaaataagattattctggtgagctcaaaacaaacaaacaaacaaacaaacaaacccccccaaaacccaaacccattgtggaaggctcaggaaatgcactatccttggctttgaagaaagaggtcaagccaaggagtggagattcttccactttctaggaaggaatgcaatttctctgacttctggatttttagctctacgagacccgtacacaggcacagtggcctaaaaaaaaaaaaaatcacaagaattcgacatgaagaatacatttggcttcacgagcttgttcaggagatgttgggacaggcaaaatccattcagctcgtgcgcagaacgctgtgctggaggcagcaggctgcgtggtgtgtgcttctctctcagggcgaggcacagtcgctgctcttctcagatggcgaagaaaaccgaaccccaggggttgccttgtttgtgcacgagtgagttacgataaagtaggcaaacccaagaaaacgccctcttaaggctcgcctcctgaagctcctagacgacaaggccaccacagtgtcaacggtctgtgcagggctcacactgtctttttccgccctgggaggatgtcacacacctcaggtcgtggactccctcagcgaagagggtcgaggtcgccgactaatgccaagtctcgcgatatttgggacgttcgcgaactgcgcgaggctgacctcgtctggaagggaagccgtttccgcccgctgaaaggctagcccatcttctcgcgatatctggagggaggcgagcgatagagcgcagaggcgctcgttctcgcgggatttacgggctctgacgagcgttggctggtcgctgaggtgacgccgccgcgtcaggccccacatagcgccccccgctccgggcgggcgatgcccggcagccggcccacgtgccgtgctctcctcgccgccgagagcggcggggctgccgggtgcctgcccctagcccgatggacatctccgccccgcagtcccgcgcagactcccgcaaaggtatgagctccgagctcgcgcctctgcgcaggcacacgtcttcagggcacttccggaagcggctcccgcgtgcttcctgtgattgacagctgcgggtttcgaactcttgccccgcgggaagtcctcggctttgcgactcagccgcctggacgaaagaatttagtgctgtccctcacagttactcgccgagcagtgggaacagactcctcatctgtaaaacgaggactattgcttcttgtgactattagatgagatgagatgcaagtgactccacttttgacccttggcgttcagtaaatgtcatttttgtctttgtatatgccagttattagtcaatagcagggatctgttaggtagatgagcaaaggtctatttatttagtttagttcacttacatggtgtattgaagcagaattttgcctctagtagatcaccaagagcttttgaaagtgcagttatctcacaagccatcagggatgcagacttaacctctagcttttattaataaaattgattgatataacagattacaaactttgtgtatatgtgtgcatcaggcatgtgaaagtcagaggatagcttgggtgagtcagttctccttatgaattcagaggctggaatccaggtcagcagtattagcagcaagttggcttacagaaggagtcaaccttcaagccctgacagaacagatttacaactgagtgttctgtgcccaggaatcattgggtaaatcttgctcttcctttgaggaagatatctcatgaaagtaagcaggtgctcaatgctaatttcagggtaagcaacaaactttgaactcgtaggactaaaaattggtcatgtcataattaagggcccacaaatagaaatgcctttatgaatctgactgctaaaggcaaatggtggatcttctaagtgacagtgatgggactgctatgtttgttccttgatgctattagaagatttagtcacttttggtattttagggggaaaattgctgatgggaagaacagatcactcaagagtgtccaagaaggaagtatgtttcctatgttggaagcaaacaaaaaaggcactttggaattgagagaggcatcccaatcattaggagcaatacccccagtcctacctttcagagaaaagtcctcccttgatcagcagttccaatctctgtagtaacagaatcattattcctgactccaacttcatctatttggttctagaaataacccaaactcaggtacaaaggtgcccataaaagatgtcctggtgttttccacatacatacaggtctacctgaaaattttttctgaaatgtgtctcccaatacttcttttccatagcactctgttctcttcttccaaagcaccttttgccattatgtttatgtctatgagttttttaggggctatctcactagatcaataatttgttttcacttaaaaattcagcttatagccgggcgtggtggcacacgactttaatctcattactcggaaggcagaggcaggcggatttctgagttcgaggccagcctggtctacagagtgagttcaggacagccagggctacactgagaaacactgtctcaaaaaaacaaaacaaaacaaaaaaaaaaatcagcttatgcttgttaactgtcttttgtgtgttagtctaagattttttcttaactagaagagctattatttcaatatgtattattccaatagataaagaatcagacatttagaatagtttaagtatatttaaactactgatatacagaattttttcaagagttttttcaataagtgatggtaccatgtactaaggacaaagtcatcgaactacttactaaatcaaatctgatgttgccttttaaaatacaggtttattagaatacagccatgctcatttagttattgtctgtgaccgatttttttctttaaagagtaagagaataaatggtctctaaactgtaatttaacgaatagctagtagttgcctatagaaaaagtttgctggctcttgctttccagagatgttggcatagagaaaaataatatttttgtttgtttcagtttctttgttttcttgagacagggtttctctgtgtagccctggctgttctgctctatagttcttagtccaaactaacctctatcgcagagatctcagagttctgcttgcctcttgtctcctgagtgcttggattaaagatttgcaccaccatacccagctgtgatttgattttgacgtaaaatcagaaaagagattgtagtggagtgtgtgtaggagtaatagaaaaagaggaaaaagggctaccttgaaaagttgtctttaaataatgctagttaataagattcagggaaactgctcactactgtttttgacactgttcttcattttatatccattgtgtggtacggtgtctaatgaacaattgatgtttgaaacatatatgttgagtgtcagattaagaaattgtgtcttttaaatgagagggagatgcatcatttaaaacagaaataatgtgttaagaatgactgtagtggtatcattagcttaggctcagcctgcactgttttagaaagaagatacttggacctcacaaccttttacttctgtagtaaagtagggtgttattttcataatagtataatagttctcagttaggatctaaaagaattgagtaggagaacatgtttttttcatgtgtatttaggataactatggtaaaaccacttcagcaaagttagtgggaataatgtttttgaggaaaaattgaagaagactgtgacagtgagctgttgttgcttaagacaacacacacccatcattgtatccatgaattagttaggaagctctaactggagctcctcaggaagatcccaggaagccagtaatggtcttgtggggttagtgcagtgtgggtaagaaaaatcatttcctttagccttacagttacagctatatatttcttggatccttgcaatgagtgattccacttgaaaattgttttagtttcctctattattgccctttaaatgttcttagtagcatattttagaagacctttcctccattcctagtggtgtgtctttaggatagaaaataaaacagaaggctggacagttaatacagaataagttcaatgtttagagtcagaatcttcagtgaatgacaggctcttacaaaaggatcttagaattcatctctttttttaagacttattttatgtatgtgagtgttttgcctacatatacatgtgtatcacatgtctgcctggaacacagggaaatcagaagagagtgttgaataacctagaatttgagttatggatggttgtgacccaccatgcgaatactgggaattgaactctggtcttctgcaagacctttaaatgctcttaacttcagagccatctctctagctcctagaactcatcatctcttagtaaacccaaaagggataatctatgatgattgtgacatcaatgtagttaaataagaggttccctatgtgagttaaatactctgtgtccagggaagcatggagtaaatataaaaagcacatgccacaaaagcattactgtcctgaacattttagcttactccttactgcatctatttcttttactgcatcatataaggagaatatgtgtaatcttcctgagtcagcaagactatttaaatcaggactttcagctctggttgtaacaactaaacaaattgtgaaaacaaatgttcatggcttacatgattaattggaatcaccagagttagtctcctggcaatttatttttaaacctagcaaatatactttcaatgctacacatctaggagaagaactacagaaaataaatcaaaccgatgattataggaaacatctgatatatatatatatatatatatatatatatatatatatatatatatatacatatatgtacatatatgtatatatacatacacatacacacacatacatgcatatacatatatatatgaaaataaatataagctattttgtttcagttatttggaaaatatgttaaatcttttttctcaataagtaactaaggtatgacttcataagtttttgaaaagttaattttcttcctttttatagacaggtggtgtccgggagaaagatgtcttgctccatctttggataacaaaaagctttgtgaagcaagcataaaatctattactgtggatggaaatgggaaaccttttgcagttgtcctgtatccagactttcaagaaaagacaatacctcttcaaagacttcaagaagtaaaatcaactaaagattactccagaagtcttatatttgatgatgaagatttagaaaaaccttatttcccagatcgaaaaattccatctttggctagtgcttttcaattatctgaagatggagactcaattccttatactattaataggtacttgcgagattaccaaagggagggggctcagttcctctacagacactacatagaggggagagggtgtattcttggtgatgacatgggacttggaaaaacaatacaggtaaatattagttaccttataattaaagataagctcatatgtataagagtgaatacactgcaaatctctgtaatgcacctgttaccgtaggtttttgtttgtgttttgtttgtttgtgtttttgtttgtttttgtttgtgtttagtttgatggaaagttttcaaaattgaagacagtgactcaatgtctcattgttttatgctcagtactttattagtatttggggaataacatttttttttattaatttttattcttagagaaaatgctatatacaatgaaaaaagttaattaacttctagagccccaagctctttaagacagaaataatatagcccttgcaaattgttgtttgggtttggtgtctaattcatattgtggactagaggtttgtaaagagaagtgtgctagatctcctttcaaaatgacatttaattttatatttaaaagatgtataatatttataatgttctttcccctctcccagctcctctcaaatcttccccctttcccaacttaatgttctttttttcctaataaaagaaagaaagaaagaaacaaacaaaccaaaatatcacccaaccaccaccagcacacacactcaaaaacaaagcaaagaaaacccatggaatccatcttgtgttggtcaacaactcctgagcataaggcctgccctggaatgtggttgatacatccaatgtcactccacccattttccctctgtgatcagctgtgtggaaatagctttttggttatgaatgtgactcttcccacttccattggcatgaacttgtgcagatcttctgtatgctgttgcagtttctgagctgatgtatacatcagccctgttacagctagaatatctgtttccttggagttgtccatgacctcttacagtctttccatttcctcttcagcatcagtctgagagccttgaggggtggggtgtgatgaagacatccatttagtgcagtgctccgaagttcttccactctgcactagcacttttttaaaagtatgatcctgaaacactcttgtttctttttatgtcctatgagatgaaaaaaaaagaggaatgtgttcatcttttttttaatgataatacttttgtgggggttgtagtggggagactaggccttttgtttgaatgtttgaggtgctgtttcccagcctcatatttattctatatcatgaggtgactgcatgtgaggaaagatggcctataaaagtgttgcttgcagagtttagaaaggaatgtctgggaaaacaaaactttccctgactgtttttttccacccctttctgaaatgtaggtcatggccttttattattctagatgtgacagaattaatttttttttctgtaagcaattttgtaaatattctacaataaagcaccttctgatgattttctttgaaattagttttgtaaatcttcattctaaatttgtcatagatctgcaaattctaatttttatagacctgtactgtgccagtggattgtggtagagcaggcccaaccttttccaaatattcatgttctctttgctgcagagtagtagcctgactaaagtgtttttctaatccatgaaccaccttatgatccttcttttccctttggatattagcacattatagttagcattactttaattaacgtgttaagctgagagatttccatggttttaatttccctgttcatttagggtgtattctcaactaaagtcaagttgccctaggttggagttgttatatgtcttctttgctctcactaatcccattaatttctgcctggctggacacacattcacacatacacacacattcatatacacacacacatacacatatttatttgtgtgtgtgtgtatgcatactcatgcacatgtgccacagaggatggcttgtggcagttttcctatgtgggtaccagggaattgagctcaggtcatcaggcatggtgacgtgtgcctttgtctacagaagccatctccctagccctccctggattctttaacaataactatttattttcttggttttctctgtctttttcttaactggattttcagtctgtctccttgtcacttctgtccttcagaccccttggtttcatgttgctgagtgaccaaagcagttactggagtctctagactgtctcagcacccagcacagtgcctgtcttgtcatgggtagtagatgtgtgctgtctatgtggttgcttcagttttttttttttttttaaatctaacattaatgtagctgcatcagtttttattgctttctgtttttatattcagtcttcaatttataatcataattttctctgtccttgattttttatcttttacatagcatacatatgttgtgtctgacaatccttgtctttgaaaaaaatttacgatattaaaaaaaaagtgggtatatgtgctgtcttctgtgcacatacaagcacacttgaagggtgctggcccaggctttgcttcttatgtagagcatccattttatacatagagtgctattgggctattatgttactatttagtttttacttatatatatatgtctttttgggtttttttttttgctgtcttttggatagattgtgttgcattgccttgaaccctgcttgttaagtagatagttatcttagtgattaccccagagctcatgatagatgttttctgcttatcaaatatagcatgtactttttttttcctttgtggacataataagggccttaggaactgtagctacccctacccctgacttagataaaagagctgtagcctaacttcttgtcatttaatgccaacaaaaggttgtttggctttcttttagtcagtataccgtgtcttcctgcctgcttgccgtttttcttgctcttacattttgctcttgctgctgtactgctcttttgcctagaatcatctacttgtgcttagattttcacttatactacttttatattttatattaatatttttatatttacacattacaagagtgtggttctttttgtaatcaattgcctggttttagttgtctgaaaatatcttcattttacattcttaaatattgttactgagtataaaaacctaggttatattattctccttattactttactttgaaagtattgtattgtatagtgtctttattgttttttattactttgtatttaattgttgctgtattgtaggtaatctgattttatttactctagcctcttttaaatcaattttgtgtctcagttttattttatgaagtacctacttgtgaatttttgttaatttttaaaattttgccatggtgagtaattaatattcatcactaatgatcctgtggcttaagatattattttatcttatttttattagatattttctttatttacatttcaaatgttatcccctttcctagttttccctctgaaaatccccttccccctcctacctccctctgtttcccaacccacccactcttatttctggccctggcattcccctatactggggcatagaactttcacaggacctagggcttctcctcccattgatgaccaactaggtcatcctctgctacatatatagctagagccacaagttccaccatgtgttttctttgattggtggtatagttccaaagagctctggggttactggttaaccccatattgatgttcctcctatggggcttcaaatgatcaacttttatttcttcaaataaatctcattaccatttcctttatcatttgggatttagattatagatatctgcatattaaaaattacttttcttataagatgtgcactgacaagaaaatgtatggaattacagtcacacctgtattttgtaacttgtaaacaacctggtaaagttgaaggattgctaaagtttgaggccaccttgacaggactcccaagtgagttttaggctacacaggactcaaaagagaccttctgtcagctcccttatttagccccaatacagacttttcattatagtttttgtaagtctataatttataatttatgcttaaaagtaatgtttttccttctatatagataccaactcatacatatttaccccacatctttaaaataaccctactgatattattgttgtcatctttatagataactatatagggagtttaattaccttactgaagttcacatagttgccaaataaccagagctaacatttgaaccaacaagtatctaattgattgagtgttctttgcccttgattgttggagtctgcatccttttcttatttttatccttctcatttaatttttggagaaaagttgctattcaaatggtatgttttgatgagcgtattagcatagcttaaattagcccctgtcattcattaaagataggtacaaaattttgagtcaagtactttctccttgaaggaatttattttctacaagaaaagaaaaaaaaatggatagtttattctagaggctttgagaagatagtttccatggatagaaacaaatactaaggtactaactatctcagatgatggaatcacaaaagaacttatctggtgggcagaattgtcccgagaggagatgccagtatggagttttatgtgttgcttgttaagttaaagaaagtcccagtgtttttctgtttcccctaacatctttttgcctgtggtgtgctactgattagattgtcatgtgtacagtaaagttatgcatagtaatagaaaaagcttttttatttccaggttatttcatttctggctgcagttttgcataaaaagggaactcgtgaagatattgaaaataacatgccagagtttttactaaaaagtatgaaaaagaagccgccttctacagctaaaaaggtgaataaaagtgttcaactcataaagttgacattgcaaacacagaagcatttaaacacaatgtaatatatcttacattttaatacaagagtttgaacataaaaatatttattttgtaagactactttttaacaatttttttattagatattttcttcatttacaattcaaatgctatcccaaaagtcccttataccctcctccgaccctgctctccaacccacccactcccacttcctggccctggtattcccctgtattggagtatataatctttgcaagaccaagggcctctcctcccaatgatggccgattaggccatcttctgctacatgtgcagctagagacacgagctctgggggtactggttagttcatattgttgttccacctatagggttgcagaccccttcagcctcttgggtactttctctagctcctccattgggggccatgtgttccatccagtagatgactcagagcatccacttctgtattgccaggcactggcatagcctcacaagagtcagctatatcagggtcctgtcagcaaaatcttgctggcatatgcaattatgtctgcatttagtggttgattatggtatggatccccggatggggcagtctctgcatggtccttccttccttctcatctccaaactttgtaactccttacatggctattttgttccccattctaaggagggactaagtatccacactttggtatttcttcttcttgagtttcatgtgttttgcaaattgtatcttggatattctaagtttctgggctaatatccacttatcagtgagtgaatatcatgtgagttcttttgtgactgggttacctcactcaggatgataccctccagatccatccatttgcctaagaatttcatgaattcattgtttttaatagctgagtagtactccattgtataaatgtaccacattttctgtatccatttctctgttgagggacatctgggttctttccagcttctgactattataaatagggctggtatgaacgtagtggagcatgtgttcttattaccaggtggaacatcttctggatatatgcccagaagaggtattgctggatcctgcagtagtactatgtccaattttctgaggaaccgccagactgatttccagagtggttgtacaagcttgcaatcccaccaacaatggatgagtgttcctctttctccacatcctcaccagcatctgctgtcacctgaatttttgatcttagacattctgactggtgtgaggtggaatctcagggttgttttgatttgcatttccctgatgattaaggatgttgaacatttttcaggtgcttctcagcccttgggtattcctcagttgagaattctttgtttagttctgtacccgattttttaatggggttatttgattttctggagtccagcttcttgagttctttatatatatattggatattagtcccctattggttttaggattggtaaaaatcctttcccaatctgttggtggcctttttgtcttattgacagtgtcttttgccttacagaagctttgcaattttatgaggtcccatttgtcaattctcaatcttacagcacaagccattggtgttctgttcaggaatttttcccctgtgcccatatcttcgagacttttcccccactttcttctctataagttttagtgtctctggttttattttgagttccttgatccacttagacttgagcttagtacaaggagataagaatggatcaattctcattcttctacatgataactgccagttaagccagtactatctgttgaaatgctgtcttttttccactgaatggttttagctcctttgtcaaagatcaagtgaccataggtgtgtgggttcatttctgggtcttcagttctattccattgatctacctgtctgtcactgtaccagtaccatgcagtttttatcataattgctgtgtagtacagcttgaggtcaggcatggtgattcccccagtggttcttttattgttgagaatagtttttgctatcctaggttttttgttattccagatgaatttgtaaattgttctttctaactctgtgaagaattaagttggaattttgatggggattgcattgaatctgtagattgcttttggcaggatagccatttttactatattaatccatgaacatgagagatctttccatcttctgagatcttcttcgatttctttcttcagagacttgttcttctcatacagatctttaacttccttagttagagtcacaccaaggtattttatattatttgtgtctattgtgaagggtgttgtttccctaatttctttttttttaaattttttattaggtattttcctcatttacatttccannnnnnnnnnnnnnnnnnnncccccactccccctttttggccctggcattcccctggggcatataaagtttgcaagtccaatgggcctctctttccagtgatggccgactaggccatcttttgatacatatgcagctagagtcaagagctccggggtactggttagttcataatgttgttccacctatagggttgcagatccctttagctccttgggtactttctctagctcttccattgggggccctgtgatccttccagtagctgaccctaatttctttctcagcgtgtttatcctttgtgtagagaaagaccactgatttgtttgaattgattttatatccagctactacactgaagctgtttatcaggcttaggagttctctagtggaatttttagggtcacctatatgtactatcatatcatctgcaagtagtgatattttgacttcttcctttccaatttgtatccccctggtctccttttgttgtctaattgctctggctaggacttcaagtactatattgaataggtagggagaaagtgggcagccttgtctagtccctgatcttagtgggattgcttcaagtttctctccatttagtttgatgttgggtactggtttgctgtttattgcttttattatgtttaggtatgggccttgaatttctgatctttccaagacttttatcatgaatgggtgttggattttgtcaaatgctttctccgaatctaacaagatgatcatgtggtttttgtctttgagtttgtttatatagtaaattacattgatggatttccatatattgaaccatccctgtatccctgggatgaagcctacttgatcatgatggatgatcgttttgatgtgttcttaaattcggtttgtgaggattttattgagtatttttgcatcgatgttcataagggaaattggtctaaagttctctttctttgttggatctttatgtggtttaggtatcagagtaattgtggcttcatagaatgaattgagtagagtaccttctcttcctattttgtggaatagtttgaagagagttggaattaggtcttctttgaaggtctgatagagctctgcaccaaacccatctggtcctgggctttttttttttttttttttggctggcagactattaatgactgctgcttctatttctttaggggatatgggactatttaggtcattaatttgattctgatttaactttggtacctggtatctgtctagaaaatcgtccatatcatccaggttttccagttttgttgagtatagccttttgtggtaggatctgatgatgttttggatttcctcaggctctttgggttggaagttgattttattcgatattagaatggctactccagtttgtttcttcggaccatttgcttggaaaattgttttccagccttttactctgaggtggtgtctatctttttccctgaggtgtttcctgtatgcagcaaaatgttgggtcctgtttacgtatccagtctgttagtttatgtctttttattggggaattgaatccgttaatattaagagatattaaggaaaagtaattattacttcctgtcatattgctttgggttcagttctgtggtgctaaatggttctacagagcttatatatccattttatgccacttacaacaactagactaggaagagaaaaaaggaagtaatgtgatttaaaacgtaaatacagttaaatgtattcagaatgttccagcaagagtaagagtaggaaaagagaaatgtatcccccatgtggttgacaaagttgacaatggagccttcccttgttcttcccttccttactttctctgtgtatatttatttatatacagaattatgtgtgtgtgcacatatactgaattatgtttgtgtgtgcacacatatactgaattatgtatgtgtgcatatatactaaattatttgtgtgcacaaatactgaattatgtgtatgtgcacatatattgaattgtgtatgtgcatatatactgaattatgtatgagtatacatatactgaattgtgtgtgtgcatatatactgaattatgttgtgtgcctatttactgaattatgtatctgtgcatacatactgaaatcctttgtcacagtgtacattgcttttattagatcttctgtagctaaaattttattaatttatgttgtcttatattcttataattttcattaatgtgtaaatgttcctttgagtactactttagctcctttctaattttggaaagtagtactattttcattattcttctctaaattacctgcacttccaattttgttctctttacccaaatactatttcaaagacaattcttaatatttctacatgattataatatttggtacagagtgaacagcaaagctctgtatctttttcttacagaataatatagccatgatgttttctatgtaaagtatttttagtgttttggtgtttattgtttggaaatattcacttgtttctttgttactatggctgcatggttctgtattttctatttaaccaagcttcattactttgttaaaagccttaatcctttagtcaaggcaagttagaaatacagtgatcctttggcttgacgaatgtcaagaattccagcacaattagcagatttactatgagaattgcctgtaaacaaacgataggggcattccaaataagaataccaagataatgaattttgcataagacctaagtttaacaattgtgaaagacctttgagtttgccttactcttttttgagatgcggactagactataaactttgtttatgggaaagcctatgtttatggggaaaccttgtgacccaatatagtaaggattccttcaacatttgtcacctgggggctggagaggtggctaagtgattaagagcactggctactcttccaaaggacctaggttcaattcccagcacccacatggcagttcccaactgtctgcaactcctttttcaggggatccagtgccctcacatagacatacatgcaggcaagacacaaatgtacaatgtaaaagttaataaaaacaaaacatttgtcacctgtaaacctgtccagtgtgtctcaggaaatacactataatatcatttactgagaacagtttgtgggagggtattagaaactatttaaaaaagaaacctcatatccaccaaaattatttatatggctactgttaaggcgctcaactctcctgagaagctcatgtccatatgtggatatgtactgtccttttcctaaatagcttttttatgttaaaatctattcttgaacctaagctaaaatcttttcttaataaactgcaactctatttcatactttctcatcctgaaacttttctgcagtgtagtgaagaatcctgacttcttgtgagtgacagtctctaaaagagaactcagacttggacaggtggcagctgtgtctcctcttctgatatgattttcttgtttatttcagcaactgagttctgagaaatctatattaaattttctgttatgactaaagttgttcatttatattgtgtttgtgttggttctcattaatctctttaagtttggttttataaatttcatttgtatattggctactcagttgacaaattatttgttgatttgtgagttcagaattttaccttataacttgacccaaataattataaaaaagataaaaattattttctgttgtacatttagataatggttcaatgctaaactgattttttgttcattgaagggaatacctaagattccatctttgaaatccctccacactgcaaagctctaatatgtactgtagaattctaccaaataagttcacttttgaaaaatgtgcccagaggctagatagatggctctacacttaggagaatttactgctcttgcagaggaccagagtttggttcctagcatacatagcttacaaccattttaaccccagttctaggagatctgatgctctggtctctataggctcctgcatgcatgtggtgcacatatgtataaaaacagaaatttagtaaatattttttcttaatttaaaaatatgtagagtacatttttataggggattctaagtattggtggcagagtaaacttttttttacaagagactgattccactagtttttcttaaaatctctgggcattgcttttattgatctgatccttccaactgcttcagtctgttgggttctgttgttgtttttatggctatttgtttcatgatttctttctcataggtacaatgtggccttctcagttctgtgaggggtgggagtggtatactcattgctgtctttctgagctgttttactctgctgggactcctttccaggtgtcacagctctgttacagattggtttccatatttgttcttcacttggttggcagcagtgcatatatgttttcagagagtccatttgaagtggcatacatttcttaagttttgtgggtaagagaataaataaaataaagataaagataatgccagaatcaaaacagaatcctgaaagaccgatttcaatctccttgaaaaataaacaatgaataaattaaatattacaaattatgagttagtagtttgaactaaggctgtatgtatgtgtaagagagattattttatatgtattctaaaacttttcaggtatgaataagtctttgaggaatgcatgaaatataagtgccaatgaattcctaaaggaaaagatacaaatcatgcattttaagtgctgcttcttggaaccattccttaaatttaagctaagtttatactgtagcttgcttggtctttacgaaataaatcatagtaagttaattgaaaatatcatcttgtaagatcaaactttggagattctaagaaaaatgtataatgaaagggaggtcagtggggagatagaccagtgggtaaagtacttgctgtgatgataacatgagtttgtccccagaacctgtgtagaaaagtaatgtcagtgctgggaaacagacaggcagatcccagcttgccagccagccagccagcttagctaaaaaaccgctgcctgcttgcatgcatgcttgcttgccttcctgcctccctgcctgtctgcctgccttcctttttttctttttatttattattcaccttttatcctgcttactgcccccctcccagtcaccctgtcccacgatccttcccccttcccctctccccttctcatctaagcagttgtcccaccctcatcccccccgggtgtattcacacacccaggcttcatgtttctgtgaggttaggtgcttattcttccattgaagccagacaaggcagcccagctagaagaacatatcccacatacaggcaacagcttttgggataacccctgctccattcatttagggtccggagctgcacatttgttgtatgtgttcagggaggcctaggtccagccggtatatgttcattggtttgtggttcagtctttgagagctccaagggtccaggttgaagccagacaaggcagcccagctagaagaacttgtcatatacaaaatctaaagagaggcatcataaccagacatagcattttgagccttgacattgtattcgaaagtgggagaaaaattaaattgtaaggtaaactacaatagccaaaggtatgtgaagtgaagccagatgggaaggtgcttctgtgcttagtgagtggggtaaggagttagtttcagctagacttttgttttcttctttctctttacaaacacagtcacatactctgtttctttcaggtcataagtggcctgatgaaacattacacaaaatctttcattttatgctgttttattgcttcatctcttgagagtgggcaagtataaacctttagaaaagtttatcactaatcctcttatatgtaataacctaggagtattggtcataaagaaaagtaaaaacaaaaaagttttaagtagttgatgagaatgatattcagtgttaaaaacaaaaaatggagcctccaagcacaactgtgaaaactagattgtgctacttgaaagctgaattaatccactttctgtcactgtgacaaattaccagatataagtaacttaaaagaatgagaagtttattttggctcttagttttagaggttttggtccatgaccagttgtcttggctttatagcctgtggcaaggcagtaagtacatcatgataggaatatgtggcagaggaagctgttcattcattgaggacaaagtgaaaaagataggagagatgttctccaagggcactgaaccatgtcccaattcacaatagttcaatttcccttcacaaggcactgtttttttaaagtctcgccatctccctgggaaccaagccttttccacacatgcctttggggaacatttcatatccagactgtagcttatctctaaatagctagaagctcagtagagagcaggggatagaggtaacaagtgtcacgtcttgagaacttagctgtgaagaagaacctggtaaccaaagatgtgcatggagaaaacatgctcgatcttgtttcagtttcattttttttaatagaaaatatgccagttgataaaagttgtcctttataaaaataaagctgtcatgtggggaaggctggggccaaatttaccatgttgatttcagactgatagacagatgggagctactgagtagcatcaaactgtgttgtctttgaggaacataaacagttaacctgtagtcaaaggtgggaaggcagggtatgtggaaataaacacaggtaaagttactaacagaaagctaagtagaggtcctctgcttgctccagttttccagtttttcatgcctttgactgatagagtctgagaaaaagggactaggaaagagaagaaaggaacccagagggctgttcagagaaggatgctgcccatttgttgggatcctaatgttactgttctctctcttagagagttatgtttctcttcttcagtgcctttaagaatagaaatgaaaataactattcctttcagcgggttatcttgtttgttctaacaaaaaactaattaagtaaagaatatttttgaagatttttgcccacatttagcaaaccaattagttgtattaattgcttacttatagcatcaaaatcaaacagtggaactattgatactgtgccatttcatgttggagttcttattaaaaacgtggatgcttttcttcctgtttttagatgttcttaatagttgctcctctttctgtcctctacaactggaaggatgaattggatacctggggatatttcagagttactgttttacacggtagcaaaaaagacaatgagctgcttcgtttaaagcagaggaaatgtgaaattgctctgacgacctatgaaacactgcgcttgtgtctggaggagcttaacaggtaaactggtgagagcagtgacgtcagcgtgctgccgacatcggtcatgtgcatctttatatcgtggctcaaagcacaagctccttcagcttgattttcatgtcaggttgtaaaccatagtgtgacagctgactccatcggcacagcttcccaccacttcatattgtaattcttaaactcagaacaggactcctttctaaaaagtgcattttagagagtggaaagatttgtcccaagttccatgtacagcactttgcataggtgatgcctacaacaacattgaaaaccacttagaacattttggtctgcaccttagatcagtagcacacccctgatgaatttccagcaggttatggagaaaaaaagctcctattggtatgttgagctacgtcgatggaagaaaaccaattaagagattttttttttctgacctaatttttgcccaaattcccagtttaagtgtataggtcccaatgttagaatgtaatcaagcttaaagatgtgattaagaaaaaattgggctgtttacataggattataagtcaaaatgaggtgtccttactagataacagacaagtaccatgagcataaaagaataggggatatgtgagttacctaataagtcttttaagttctaaaataccatggttttaactagtatgaattatagtcagtgaaagagagaatggcagaaaactaccttaaaagtgattctttcaaatcagctaaaatgccctggcatgagatcacacagatgtactcatgagtaaaatgtagcgagatgagatggtgcatagccagaaccctacctgctctggagctgaggtgagaggatcatgaatttaaggccagcatgaacaaacacagtggggcctgtgctcaaaaataacaacaaaaatatatatactaaaaagcacatgctacaaagctatgtagatttgggtaagtcatctcatctagaaaatgccaggatgaattggatcgcttttgccaaaatgggctattcaaacacaggtggaaagttttcattagaattaacctaatgaggtacaataatcaatagtgatttttacacgtagttagcttccatttctacggattccacatggctagaaaaatgtgtctataacaaattaatgattttcctaaacaactcagtatatttttatatagcatttacactgtggagggtattacatattacataggttatttgaagaatacaggaagatatatgtagattatctgctgatactgtgtcattttatgtaagagactggaacttccacatattttggtccctgaaccaatcctcagatactaaggggtaccttttatagtgccgtgaatattgacctaacatacttagatttttctgtaaaggtccagttagtaaatattttgaggctatacataatttctgtggaatattcttttttatttttcaacttactaaaaatatgaaattattcttagtttcttgaccatgcaaaactactcacaatctggttttagcccaacagccacagtttgctgacacctgttttgaaaaatgaacacctgagctcaacccctatcccaagcaagggagaacacatttgtatgatcccaactgtcctcctccttacaggcaaacattctgcagttctcaccatgaacacgcatcttgactcctgtcaccacagactgtttcaagctagtccagagagttccagtaacgcaagtcagctgcaagtctcctcattcatctttgcccaacacgtttttaagactcccctggaccatccaccaaatcactagttatttttttagatgttgagttgtattccgtcttatgagaatgttcctctttctgttacccattcatttgaaattagttatttaatttgtttcctagctcattattagtacaagtaaaatgtcaagaaatatgtttatggaagccctttttgacatggtttttatttttgttgggtagataaatgagagtgtctattttagtttagagtaagtacaggtttaaatggaaaaaaatgcaaacctgttttccatagtgattatgccgttgtactttaacggaattgtataagggctctgtagcttcatagtctcacctatattagcattgtgagtctttttgcttttactcaatttagggagatatagtacatgacatcatgataggaattatatctttataatacatgtgcccctgaaaagtttattctacagttgctaggtagtgttctctaagtgtcaagaagcctagattgatctgtgtagttttgaatgttttctactgattttctttgggattggattataatttctgagatgagatttgaaatcacatagttatttatatctcctcagttctggaactttaagtactatatgtttaagttctatttctaggtttacatgcagtttcaaattttaatttttttctgatgggttaattttgaagaatacctcttaaattttatatcttatagtcatttatgtaatattaataaacttctaacagtcctctgatgcctactgtttagtatagtttttccacccttttattgcaacattttctttatatttttagtgactttctttacaagtagagtttagttgaactgtgatttttttcttaatgtctattctgacagtctttgcatttgtgaggtagatatttagaccattcatatttaatgcagcatgggtaaacttaaattttactaggtaggctttggttgtgattttttactgttttatggattttggcaaaagacaatactcttggttttggagagattattaagtaatttgtctaagcttacacagtcaagtcagtggtttgcatgaggttttaacattgattaccaatttaactccagacctttgggttaaaccagcatgtaacctgaaaactagatgttatgcaataagataaatgtaataaattatcttatagccacattttaattgtttacctgtccttttagagtgtgttccttaacatagatttcatatttaacttctatgtttcaatgcttattgtattttaacatgtatttgctaaagaaatatttaagtgattattttatgtggcacaagtattaagagtttcaaaaattacataattgtaaaccatgtatttataaaagtagagaaatgaggacattccttttttgttgttacttgttactagttcaaatgtctttgttttgatatactttaaatgttttatgttagatctgagtgagtactattttgtgcatttgatactctgtatatttataataaataatccacagagtagacaatgcatggtatattgctgttgaacaataattattactattatattcatcatattttatgaagtattggtagatttaaatatgtataaaaagccaaataaggctgcattttgtgtgcactctttctaacctgtacctcgagctgttaacagatactactcagtcaggctgtctgtcttgtctgtctgtctgtctctcctttgcccatccttcccattaccccactttgttcagttttgcttagttttcaaatagtttcttcttacccaggctagctagacttttctgtatacctcaggctggccttaaaatcattttgggggggagggtttacaatttttataaaaagtttttattggttattttatttacatttcaaattttattccccttcctggtttccccttcacaaactccctaacccaactcccctcccccctacttttatgagggtgctccccaaccacccctccactccctcaacaccttagcattctcccatgttggggcatcaagacttcataggaccaagggcctcccctctcattgatgccaaataagaccatcctctgctacatatgcagctggagcctttggccttaagttcttgatattcctgcctccacttcctgagtggttggattacaagtgtaatctaacttttatatccacatctctaacaacatatttatgctacaatttttaaagatttttatgtatctgtctttttcttggggaaaattaagattttgccatactttgcctttttatttccttatatgagaaacttttcacgtatgtattgtagagtgagaatcattatttttgaacttcttcaacaaatggttgggtatttatgtgactctagtttcctgagtcacccagtattcccactccctaaccttttaagaactacacaagtgcataaaagtgctccttggtttgctctgctgctgcctacagaccattttctctgtttctctaagtcatcctgtctgtcttctttccatttcttcctttctgtgttctagaaagggtctatctttttgtacctttaaattaaggaatctgtagaaaagttggacaaatgtgtacgagaatttatctacttaacagttagaacccatagatctttttgtgtatgcatgtgtgtgcattcatgcatgtgtgtctgtgtacgtgcatgtgtgtgtaagcatgcatgtgtgttcacatattatacacatataaatatacacattgtctaagtacactagtgaatgactttagtaagtttcacatagcatgacagcttgagcccatattttaattttgttatatatctaaattagtgtcctttatacttcgttattcttatcttatgggtaggtgacttggtaaagtgcttgctatgaagcatgaggacctaactttgattccgtagaacccactgaaaattgtggcacatatctgtaggttgagaattccctacctagctcatctcacctaattgcccaactccagaccagggagagagcctgtctccaaaaaaaaacaatgtggacagcgcctaaggtgtaataccttctgaagttgacctctgaccttcacatggcatgtgcacacatgtgtacccatacagatgggttcttaaacacatacatacatacatacatacatacatacattcacaaaggaaagtagtaaaaaaaattaaaagatgaggggaaacagaaagcaattaaaatttctttaattatccttaagttattattaatagttaatatctatgaagcaggattcagtaaaggtttgtatcatgactttagttattaagtcttttatactcacctgatgttgagtgatcccatttataatttgaatttcaataaagctttgttacatgcaggttgacattgttgtcaagaatgctttatatggcagtgaacttcacatttgtcactttggggagttccatgttgttcattgttaatggcactaaatttacctattgggtaagaaagaaagcatccatacaatatcttcaaaatacagtcttttcttgacaatagcaaagctataaagcagcattgtaaatagtttgattcttatgtccattatgtagatgttttggcatgtaaaatttatccttagttgaatccatttatcttattgggtcttatagcataatctgcttttgtagtttatcactttctttatcttattaatggtatacttctataaagaagagtctcattggttaggaattagatacaattttaacttaaagcaaggtaatgaatgtcggattgcattggaataagaagttaaaccaatgagcaagtctacaatgatagtagtttatccttcttttcttttctcctgagctgtagacatgcttatttgcaatgtgtatgttctcagagttgaagtgatttgcctatcttttgattagaatgttgagctgtagtagcatatagtccatatgcagatgtttgttttctctcagtctctttcattttctaaatggtgtcttcagaacggcaaaagtttgtaactttgacaacatccaatttatcacaaaaacttctgagaagtttgtgtctgactagaatcaggaaaattgatctgttttataaattttattgcttttttaatctttagatttgtaatatatcttaggttcacttttatgtatggtatctgttttttccctttaagttctaaatgtttatttattcaatattctgtacccaattgtaactgttattcttgatgcttcaatattctcattagactggctcctgttcttgacatttatcctgggtttggctcttaagcatttctgccatgttcctgaacaaaccaccccactgatgcacagcaatcactgcgaacctcttctgtaaacagtgtttataacaagtttcaagaagcactgaggtttatattgatgcttttcattccgatttaatgtatagtttgtttctttgatgtgtctgtttttggctttttgcttaaaggaggaattgtcatttaataatgcttaaactttttttccagcattatcaaatatgctctctaaagcagttatagtatcatatacattttattggggcttacaaaatgatgtcttttctcatttcttatgttttctatatttttatcagtgatgttctgtgactcagggccacgtagccagatgagagttcagtaggatcagcaaaggatgaaggggttaggggtttctaaaaaattgttgtgtaaatgtctaaagtaaggaaattttctgttccttcctcccactcgtccccatctctcttgtagtttggaatggtcagctattattgtagatgaagctcatagaatcaagaatccaaaagcccgagttacagaagttatgaaggctgtgaagtgtaaggtccgcattggcctcactggtactgtccttcagaacaacatgaaggagctgtggtgtgtcatggactggtgagtgtatggacgtttcaaggacagtgtttagatgaatgctgcctgttttctgattgctggttctttaaattacagcccttcgtccagaaaagtgatcacttaactgcttacagaaatacccattcccaacaggtttcagtgtccaaagtcctgtggaaagtcttagcgtgctattgttgatccccagggtaataaatgctgaattactagtccatcatcttcaattataaacagtcataaagagggaatgctgttttccagagtcttgttttaattgttattaagtaagccactgaataatcaatagaatttcattcttttctttttagataaattagtaactcttaaattttttcttactgcctttgtgaagggctgtgccaggacttttaggtagcaggattcacttcaagaagcaattttctgacccagtggaacatggccagagacacacagcaacaaaaagagaacttgctactggccgaaaagccatgcacaggcttgcaaaaaagatgtctggctggtttctcaggcgtaccaagactcttatcaagggccagctgcctaagaaagaagaccgggtaagaactgcgtttgcatatagtatcaatcccttgtcacactttgtgcttttctgaaaaggattgcatttctttttagggttactattgtagaattagtttgttatgtgtgggatttcaggaaacatgaattgagctcagttttatttttttcctaattttaccaacctgatcgctaatagaactattattagtgcatgtgtttgctagctttctattaccatgacatattctggagataaatcactatacaaagaggaaaggtttaccttggttttataggttttagtctatggtcccttggacctgtggctcatgggaaaacatggtgaacaagctcttacctcacaatgttggggaggaaaaaagagacaggaaggggtcaggaacccagtgtccccttcagggacacggtctcactgaacttggttccttgtgaaggctccaccacctcccagtggtgccaaaagccatcaagctggatttttgacttatggacctatgggcagcctttgggatccaagccatgacagtatcatctaacacacatcttaagctaggtatagtggcttacacttttaatctcagcaccaaaaagcagaggcaggtggatctctgagttcaggctagccaagtctacacagtaaaactctttctcagaaaacaaaacaaaacaaaaccagaccaaatcttcatgtcttatcaaggcttttgattcatttctgccttaaggaagtagggagagcttccctttgtattgagttttttcttcacacacacagtactgctcagtgtgttctgacatcttgattctagttgtaagactaaagtggttaagacctttttcttctacattggctttatgtgaaatgctgtttgtagttatgctactgacccaatttttaactggtaagaaaataatattgttactgttttaagaaaattgaagttgtctaggattttttttttacatttccttgattgtttaaccttgtgattcttaatagttctagcagtagagaaaagattctgtaaattattatgagccaaatctaactcatgctgtggtgatagtatcaaatgtactctaatcttaggataccttataaaaatagatttgaaaataaaggctggtactggtgtggaggtggagaaaattgataatatgtgacttgatatttatctaaagcaaatattatgctagagtactttgtgaacctgttttttaaaatgttgcatgcagaggtgtgtgtgtatgtacatggatatgtgtgcaatctgttaagtaggaataatacaaacaaatacatcaagcgagaactttgcctaaagatttagaacttgggctctgactctcccagttaaaggtttcctcagttgagcagcccactgagaccagtgttgtttaagtgaaaccaatggtgtcagatgggcttcacatggttgctctgaaatgcatgacacgtaagaaatgcttagtaactgttagtgttgagtactaacatagtaaatgcactgtatatctagtcaccgactgttatcttctatgttcttcaaggagtaattatattttgtagacatgttttttaaattgtagcattgtttttaaagacattcctgtattcactgaatgcatacttttttgtaatactctcccattgtatttatataaatatttattagaaatacttaaaaaataaggaaatactgttccttattgctcacatttttatggcctgatataaataaatttgattttaacactggttacatacatgtctagaagaattttatttatttctagtgctgccagaagtaagagagaaatgtgttctttataacttgttttgttataatattttgtacttgaatttggacatacaatagaaaattatgtttgcttttgcaaatatttattttcctcactaattttagaatatatggcaagatactcaaaacaagtagctaacatattatgaaatttttagcatttttgtcagtttttcagtattcagtaacatttataatttatactaatgttctaaattttttgttttaccttattgtgatttgtttccataataaactgataaaaatgtctaaggagacccacaatatactgagaatgtataaggaagccacattatttgtttttcatgtaatttttttcctttaagagaaaacaagaacaaatgataaggtttacttatatgtacagtataaagtgggatgaggaggaaaggtaattgtcatagagacataagcagaggtagtgtgggtgatagcactgttgccctggtcaaatccagtgcccgttgtgatgatttttctcaccactagaagaatcctaataattgtcttctcctttgtgtacagatggtgtattgttctttgacagacttccagaaagctgtctaccaaacagtgttagaaacagaagatgtggctctgatcctcacatcctctcagccttgtacctgtggcagtggccagaagcgcagaaagtgttgttacaaggcaagcatttccattcatctctacagtttgctcttgtgttagcaacaccacttttcttcatttctttaacttcagaagtagtgtttttaagaagttatcaaggggctaagcctgacagcttagttctgatccctagagcccacctggggtgcattaaaaggttctgtgatcccaccactccctcacaagatctgagtgtgaatggagaatcctgggagcttatggttcagtaagagaacctgcttctaaacaggtagaaggcaggaattggctcttgaaagtaaccccctagggctgtagagatggctctgcagttaagaccactgattgctcttctattcctgagttcaattcccagcaaccacatggtggctcataaccatctgtaatagtatctaatgccctcttctggtgtggctgatgacagagacatgtactcacacacataaaataaataaataaatctttttttaaaaaagggttatcctctggccttcagatgcatgccatagcacatacatgcctgcatcacatgcatacgcatttgtaaacacaacttaccaataatgctttacaatgcttaataaccacatacaaaatacaatattcaatagctataaaacatagtttagaaactaaacttcaaatttgtatcttcttacttcatattagtaagtagtctactttcgtcttaattttttttttttcttttcacaaatttcccaccactgcttgtaagaatgattcactgcttgctgggaagatgtgactactagtcacagtgtccatttaatagagatttgggttaatagaacaaaatgctttttaagggatagtcacttgtttttctatctgctctttatatttcttgctcttttttttttaacctcttctgtcatatatctgtgatgattacagggaccctatgtatttatccagattgctttttattctacctaagtggttttgctgttttcagtcctttccattcccagttagttttgttatcagattatggggctacaacctgttccacaagtcaggtctggctactcatcagtaatacaatttaaaaagcaaatttaaaaatggaaagcagaagaaggagatttgttcagctcagctatgttgggaagagggacaagggtccatcagattcctcaagcccatcttcagggtccagaagtgagatcaagtttaaatagaaggcagaggatgtacacatgtaagcagtgtcagtcaaagtgaggtcccgcccaccactgattcatcagtgcctgggcttcagtctgtgatgtgatttgacaagttagaactgtgtgagattcctgggggaattcccattttcttgcactctattgtttcaatagtctgatagattgagagacaagtatttctttagaatatgttcatttcttccaggctgtgacaacgtaagtagagagtaaagagttctttagagcactgtgacctacctagtgttgttcctagtacctccttaatggcaacttttctgtcactgtcccatccagaatggagacttcccttttattttatttttttattagatattttctttatttccttttcaaatgctatcccgaaagttccctattccttccccccaccctgctccgctacccacccactcccacttcttggccctggcattcccctgtactagggcatataaagtttgcaagactaaggggcctcttttcccaatgatggccaactagggcatcttctgctacatatgcagctagagacacaagctctgggggtactggttagttcatattgttgttccatctatagggttgcagacccctttatctccttgggtactttctctagttcctccattgggggccctgtgttccatcctatagatgactgtaagcatccacttctgtatttgccaggcactggcatagcttcacaagagacagctatatcagggtcctttcagcaaaatcttgctggcatatgcaatagtgcctgggtttggtggctgattatgggatggatccccaggtggggtagtctctggatggtccatccttttgtcttagctccaaactttgtctctgtaactccttccatgggtgttttgttccctagtctaaggaggaatgaagtatccacactttggtcttccttcttcttgattttcttgtgttttgcaaattgtatcttgggtaagtttctgggctgatatccacttatcagtgagtgcatatcaagtgacttattttgtgattgggttacctcactaaggatgatatccatttgccagatccatccatttgcccaagaatttcatgaattcattgtttttaatagctgagtagtactccattatgtaaatgtaccacattttctgtatccattcctctgttgagggacatctggattctttccagcttctggctattataaataatgcctcccttttattaagtaaacaccactacattatagtcactacatcatcaagagtgattccagggcagcgaatcatggatatccttctaagtacttggcttttactgtcttagataattagacagtgagtactaagtgatgcatcttacaattggtcatatagctgtgttattaatgcttttcttgtttgttttttctgaccattctgttacagaccaactcacggggtgacacagtgagaaccttgtgccttagttacctgactgtgcttcagaaaatagctaaccatgttgcactgctgcaggctgctagcacctccaaacatcaggtttgactttacatgtctttgtgatactatttatataaaacagatactatacagtattattgacacaaaaatcatagttttcatctaaaagagagtaagagatattttatcctggagccattttagtggccagagcctgggaacagagatttagattacaccaaatcactattttaacatggaagtggttttatgaagtttttagtttgctgaagaaagtcagaaatagaggagttttaaaaaatatattggtgggtacatcagagagatgggtacaacaagatgggggaagcttttctgtatgtccaggatcctgtccgataacattcttagcttttggattgatagaaattttattccaaaggattattctgttagtcacaggacattagttctgacacagaggtgggcaaggaatggctgttagcgatgtggggttaaaactccacccaaaataagataattaacttctgaacctgtaatattccaatctctccacaatatttcagctctaatcagtcagtcaatctcctcagacacagcttctttccagaggcatctgacttgcttattttaaaatttagtagttgaattacacaaccttgtgcatgtgcaaggtgctgagttcagtattcaacatcagtactaataattttttaaagtaaaacttaactattgagaaacgtgcacttacatttttaatcaggcagaaaaagattgagtttaaagtaatagctgttttatgtgtctaatagtgtttatgttttggtgtaattacttggatagctgataagtcaattctactctgctaatattgtgtttaattatatttgtttaatctgttttctaaacggtcaaaatccaatttgaattttaaatagcatttgctatggtaactgcaattgtatcttattctagagcacagcattagtaataaggtctcatcttcatctaacaatagtttcttgtgatgtagctagtgtgtttacttttgaaacctattaagaatctgatacagtagttttggatagtattatttattctttagggaatgtttgtctccttatttttgaaatcttgaggaagtaatgatatagtgtctgtattcataatatcaagaattcatcaaaaccatacatgtttaacgtacagctttaggattttctgaattgttaatttcacttaaagaaggtagattacatttctgcttctcacaaatagaaaatttttataaagttttattttttgtaggtttaaatatgcattgaaatttcttcttccttaaggaaacagttatcaagaggatatgtgatcgggtattttccagattcccagattttgtgcagaaaagcaaagatgcagcctttgagacactttctgaccctaaatatagtgggaaaatgaaggtatgtattcttcattcagtgtgcatacagatagatcagagcacactatgggttcttagtggcagttgcatcaaacatgcatcaagcttttccttactaatctattgggctgaagaacattttaaatgtatgttgttatcacgtatgaacaggggcaaggcctctatatctaaattgaatcttctgccttaaatttttgttttctgacctaaatagtaaaactgcaaggtaacaacatttgttctgcacattggaactgacgtggccatgttgttcttggtactgcattagtgaaggaagggtgtggaaagcaagcccagggtctgttgccctgacctaggtatctgggcattacctgtcatagtatgtgaactggtagtagcctctggcctcctacaagaagcttgtttaatccctcaatagctatcaaaaatcctcgtttatggcttcacagttcccaactttaaactatagttaagaataaggtaagatgttttacttttttggcaaagggaataaaacgggagtaattcaaattagtcaattattgttttatctaggaatatttttagcagttaatctagataagctgaacgtgatttagttgcttaaaacctagatatttagtgaaacaaaataggtggaagtagtaaaaaggattgagttaaaaattatttataaaaatcaattagtttgtattcatgagaatatcatgatttattcgaagtaattaaaatataataatctgctttttatgaaatttcaacatataaaatccagattcatttagagttctatttttagaaattacactgtatagttaagatgattagattttatttttttattttttttggtttttcgagacagggtttctctgtgtagccctggctgtcctggaactcactttgtagaccaggctggcctcaaactcagaaatctgcctgcctctgcctcctgagtgctgggattaaaggcgtgcaccaccacgcctgactagattttatttttattctggctttgtttgttggaagctaggtagacatcttggtttctatggagaacagctgattcgcaatttctaactgattgtcagtcaaacggatcttgacagtaatagctggggatatgtattgtaggactatttttacaacatttgattaacatcattatctgtgatttatactgatttgtgatatacagcctatataggcttattatagacttattgcctgtgaggttaagacctttaagtccttgacttgtgtatcttttgtgaattctgacttgtaaagctctggttctgcttatcttgtagctcagcctgcatctgcagaggctctgggcacataatgactgttttagctgtcatcgccttagaactatagcaatgactttttgatgccaatggcattcacttacctgtcaatggaataatcacgagttgcatccacttagttgagaatgtattttatccattaggtgatatgtcacaaatttatgattatttaatttatgattatttatgaaatttatgattattcatttagtgagggttttttctttaaattaacctaatgaaaacctgcaatcagaaaaaaatttccttattacttacttttgctttcacttttaaataccccaaattacaacagatctgaagctatagccaatgacaagagtagatttttgttcagcctattgctggtttaatacattagcatcttctaagggaataaaaagacaagcacagaccagaatatcttctcaaaataatgaagaataccagtatccaaagtatacagagtattctgaaaactcggtagtagaaagtagataatctagcttaaaaatggggaaggatctgaacagataacttactacagaaagaagtgcagatggcaagtaagtgcaagggagatgctgcccactgttacacctgcaaaattaagataggagacactgcacgcctgttaaggtagcgcagtccagacaccaggtgctgctgcggaccttctttcagcacaggtgaaactgctgagtgagttggtccctctgaagagtactgtagtgacttttgtcaaaacttagacttttcagtaatgtcagttacattgtttttaaaatgtgtttgatatttaaaatatgaaagtgaaatattcttaccatgttatccattagtcacattctttagttatttatgtaagaaataaatttagtgaattttactaaacttatgccctcataagtgccccacataaatttattcataattttcaaaacttggaagtaatcaagatgtccttcaaaaggcaaatggataggctgtggtacaaaaatggaatggtttttaacaataaaaattgagtaagatgtagtggtgcatgcttctaatcccgtcactctggaggcagaagcaggtgcatctcattcagttgcaaagcagtgtggtctacgtagcaagttacaggccaggcacagctacaccgtgagacctgctctcaaaaaaaaaaaaaaaaaaaaaaaaaaagtagagcacttggagaactcttaagtgtatattgctaaattaaagaagctagcctggaaaagatacatgctgtgttgctgtgtgattccatctctgaccctctggaaaaggaaaaactacagagacagatcaggggttctgggagaagataaaacattggataatgagtaaaacatcagggacttttaagcagtaacactattttttatgatgttgtaatgtgaaagcgtcaagattcattcatcagaatttggagctgtaaacaaaatgactgaactctaatacacgctgaacaatagcataagctgttaataaaaggtcagtgttcttaatgagttgtatagatacctcataaataataatgataatcatatttttagtaacattagctttatataaacatttataggaggcatatggggatatagttcagcagtagagtgtttatctggcatgcacagctatggattgatcctcagtattgcaaaaagagagatgaggtgtggtatgtgggagatttctgcacttatactcagtactgaaaacctaaaaaaaaattgatgtctatcaattaaaagcagtagtcttatataatataaacttaaaatgtatgtcctgcataaagtcagttatttcatttaaaaataaaactaaatgtaaataaaagtttatatgttgtccagatattaaaatatttcctcagactatgacagttttactcaccatctgagtagatttttaaaaaacttccaaagcattttttcccccaaagagtgaggttaagactcaaattttgaaagaagtctttactagataaactatgaagagattgttgtattgagtatattttctgtttatatctttattatcaaagaaattgtttccgtaccaagttcaggaaaacttggtacagaaaattcccttcccctctgtggattgccttttcatggtgctctgtcttcccagtgtgggaatgcttctgcttctgctgtgccatctttggactgttgcttcctctctaaagaactgtgtatgagggcagattattaagctatttgaggtcaaaatcatatctagaaatcagggctgactgtaaataaacagtgaaaagagatgtgcgtttaagaggtgagcatcaggtctctagaaattgcagagaagcaactgcaagcattgcatgtcatctgtctagaaagccattaacttgctaaaaggtaagttttgctaatttagtcttaacatactgtgggtataaaagtgtattctgaaaattaaattaatccatcatctgaaatgcttctttttagtaaaaccagttgaaatgaaccaggctttgggaactttaccaccttactgacaaacaggatgataaatagcatttggtgtggtaaatagtgtacttgttaattttgaatatataaaggggagttagctgagatgactgtgcttagtgttgtatagatcattttcaggaaatctccagtgttttctgtatgtgtaattttgttcttggcactggcctactgataacctgtgttccttcccaggtcctccagcagcttttgaatcattttaggaaacaaagagataaggttcttctcttttccttttccaccaaggtgagttccatccacaatgttcttgcttggttggcctgggtctctaggcactaagcacaaggaagtagcacattactgtctgttttcctcatccacatggcatattgtggtgagagaatgacctttccagcacatttagttatgtgctatagacagggatggccaccagcctatgaaactcaaaggtaaagctgtattttctgctgatgttcttttgagatatttaggatttttagagtttagaaaatgacaaaaaatggtttaaataaattatttgaccaatgattttctttttatttggtttcagtttgttgtttttaaagaaatacttgctgaaaaagaaaagattgcttgttttagaataacagaaagaaatacatgggttaaaagggagaaaaagtattatttggaactggaaatagatcctaggcctggcacacattaaggaatcagtctcccacagagtgacagccaggactccatgccgattgcttaagtagaagaaagaaacagtgagtccagtggtcagtgctcaccagtcaacaggccgttattggacagaacctgtgaccagaacttagcttccctgcctttcttccctgcagctgctggatgtgctgcagcagtactgtatggcctcgggcctcgattaccggcgactcgatggaagcacaaagtccgaggaaaggctcaagattgtgaaggagtttaacagttcacaagatgtgaacatttgtcttgtctccacaatgtaagaaaaataaataaaacatgatagattgatttcatctggttgttttctaaactattttgagattaattttcaataaataggcttatgttgttttctttatttgattttaaagaagcagttaaaacactgtcagttatatacagaataacaatcctttattttcttatcattctggaattccccttgtaaagacagagttaaaagataagactagagttcctgggtagtgtgagtgccctatcttcagaacagttggatttcttactcagagcttgccactgctgccttctctcccttgtcccagctggagctgctgttggattttataaggaataaatttgttccagcacctacttaatgaatctctaattagaatggcttaaagaaaattcactcttttgagaaagatgtcagttagtagaaacacctaaggaagatatttgggttataataaatactttattttttggcattgtatgtgagaattttatagatttgctatcactgttttcaaaaagagaaccagaggactttagaaataaactgcaaagagcaaaaatagaactcaaaatgagtgtggggatgaggggtgacgctgccatggtatgactgccatgggctgttctgtggagtccctgcagctgagtaaaggagagaagctttgaactctcattgctgcggatgaaatccagcatgtcctcgcccgagtccttacatacaaagcactgagtgatcttcggttaagctccagcataaaccttcttaacttcagtcatgtgtaacacactggatggaggtcccagcactgcagaactcatcatgaccacctcaggcccagctgaaaacagccagcagctctgttctcactgtgtctaaaaaagttctacgtgcacaacacattcctaatgttgacataaaaatctttcatttttaaaaatcctattagatatttacaaatctaccctatcgtcttctttgcatattgttttctgtaatttctagtctagtacttagtgttgttaaataccactctggttcttgatcctctttgggtctcataagaatttttctccctctgcaatctactgaaacttaacagtgatgtttgagacttacgttgggtgatggtcgtgtgtggtgccgcagcctggaagcatgccatctcatttgggggagatgcttttttatacttattttaaacagctccctttccttccactttctgtgtgctttctttgggatttgacccagataattctcacttgatcttttttatgggggattactccccttattgtccactttctttggttgttgttttgttttagaccagtggttctcaaccttcccaatgctataacctgttgataaagttcctcatgttgtggtgaacctctaccataatattattttttgttacttcataactgtgattttgctattactatgaattgtagtataaatacttgatacacaggctatctgacatgcagtgtcctctggggtcacaagccacaggttgaaaaccactgttttaggtgatgcatgcatcactgctggccttgagcctgctgtcctcttgctttctcagttttgcagtaaatcttcatgtattattctttaagtcagatactttacattttgtactccttgttctgtagtctgtgaaaatgccattttccaatcttgtagattatnnnnnnnnnnnnnnnnnnnncttatgtatgtatgcacatatatatatgtatatatataagttaatgttcattttaaattgtatataattttatcactattgtaaattaactgttaaaaagggaatgcaaaactaaaaaattcacaacttgaaaaggccataaccattgttacacaagatagactcatgtgagtataatgcacactcatcagtcctggtactcaagtgagtgtattgcacacacattactcctggtacttgtgtgagtgcaatgcaatcacatcagtcctggattgagttctaaatttatgtggaaccagtgtattaggtttattgaacaaacatttctataacttctatttgtttcagaaaatactaaaattattttaattgtatttgataatcttatagaaatggtatttgagtatataaaaattataaaaactagcatattaacctatgtatatggattcaaatggtcaatttgcttaagggtttattgaattgtagaaaaagaatatgccataaatatataagcatctttctatttgaaacatcaactcatataacgatggcagtgtagtattatactgattgcagaaaatgggtatgttatagcacagtggtttgttctgttgtgaatgttggtttgtttgacacagggtcttaccgtatagcttaaactggcctggaactttgactcctgcttctgtctgggtgctgagattacatgtgtaccaccatccctcacaacagtttatgctgttttctttccagggctggtggactaggtctcaattttgttggtgccaacgttgttatattatttgatccaacttggaatccagccaacgatcttcaagctgttgacaggtatgatactgacaaaatataaatgacctgtgaattcttgtgatctaaaatttagccttgaactttctacattgcttataggactagttagaaaaggtgggtactggtgaaaatttatattaaaaatgaccctaaacttcttagtagacatttgtttctgatctccaaatcctactaatgtgacataagaccataataacaaataaagtagaaccatttgttactagtcattcagaaattttgagaaactcctgagagagactcaccagagaaaagccaaagttggagtctgcagaacagaacagaaactgccagttgacagttgttggcatgaagtgacaacttgaggggtgtgggaaactaagagtagtgtgagactgatgtagattcctctctacactccatgcttacacaaggttgtctggactaggttccttaaccatctcaccagttaagtaggacactgagactagagaagttcctggtgtgttagactcagtggagccaatcaagtaattctagatttccatagaaaacaatacaggaagtaattgaataaacctatggcctgcattggaatccagacnnnnnnnnnnnnnnnnnnnntgctttctttgggatttgacccagataattctcacttgatccttttttatgggggattactccccttattgtccactttcctttggttgttgttttgttttagaccagtggttctcaaccttccccaatgctataacctgttgataaagttcctcatgttgtggtgaacctctaccataatattattttttgttacttcataactgtgattttgctattactatgaattgtagtataaatacttgatacacaggctatctgacatgcagtgtcctctggggtcacaagccacaggttgaaaaccactgttttaggtgatgcatgcatcactgctggccttgagcctgctgtcctcttgctttctcagttttgcagtaaatcttcatgtattattctttaagtcagatactttacattttgtactccttgttctgtagtctgtgaaaatgccattttccaatcttgtagattattttatttgaaacagtcatatttttacccaaattttttgtgctttctaatcttattttttatggattatctttctttcctagaatactagcaccttaactcttagatttccataaatactcttgaaacatgtttaaagaacatctgtcatttttcttggaattctttttttgagaattttatagatgagtactatatttacattatccctcccacctgggattacaagtttttgttgttgttgttgtaaattaaaatcattgagtttataagtgattttgaggaaagttggtatctttatgatatttcctttctactcattaggtttcttggatgcactgttaaagcagatacttaatttgacctattataatactaaatacataataataaatgcaatttgttaaagatatttttgtctaacgttaaatgtagttaaaattgatgtgttcacttgggacaagagtatagagtggaagacattcttagtcacagacagtactcatggtcatgagatttctgtctcaaaaactagtccttagcctgaagtggacaattatattacattgcttttaaataagtccttgcaattagccacatgacttacaagtaggctttaatttgtattatatcagaatcatcgcgtctgcctctgctttaaccagccaggtgtcatttgtactttcagtcccttagaagattgttcccctaattagcagaggacttatttgagctccctgggttgtctgagatgaatccatccctggtttctccatcaggagcctacctggaacagttggaaggttattaaatagatgctcctataacttctactttctgggcacctgaatctctcccatgttcattctgacttttccatactgcgattttattgttgtcttctttttcaaaactctttccctgtctcacctttctgcctttggtttaggtctctctggaatctttttgctatcaactctgggaagtgattttaagaagaaagaactcaatttctcttgagcactagaatttaagagtatgcttcagtttgaatacagactcggcctatttaaggagatcctttgtgcctaactggaaaatgtttggttcttaaacttaccttgaggaaagccaggccaattgatgcacacccttaatcccagcagctggaaggcagacacgggccagtctggtctacataatgagtttcaggacggcagagctacacagtgtctgaggaaaaaaaaaaaaaaaaaaaaaagaccaaatgtatcttgaggattgaagatatgaaagtatctagctctgtgaagaggatgcatagtcaatgtgaatttctttccatttggtacaagtattattgaagagtattattaccaacttttgtctttagacaatgagcatcggtgtgccaatggtctgagtgtaggatgacattagtgacagagtagcaaactggtaagcgaaaggcttaagagactgagttaggaaaagaaaagaaaagctcttttcctcagattcagttttgctgttcctttcatttaatgtcacacatcaaaattagccatacccaaagtccataaaatgtagtgaactgctagacagaataggcattcagaacagaagctgtggagattcacattaaattttacacttcattattgaacatatgttatgcacttatccaccaccaaaacccaaatatccaccacaggcttagcactagaagaataattatatttacatcatctcttatgactcctgtccataacctcctcatctccgtatctgtagcctttcttgttctccttttttcatgttttacatttgtttacatatattattggctggattccatgtatgagagaaagaatatatgggatttttttttcctttctgcgattatgtgatcttccttaatagtcttaagtgcattttcatgtaaatctctaaacttcattttgctttaactctgaatagtattctgcttatgtatgtatgcacatatatatatgtatatatataagttaatgttcattttaaattgtatataattttatcactattgtaaattaactgttaaaaagggaatgcaaaactaaaaaattcacaacttgaaaaggccataaccattgttacacaagatagactcatgtgagtataatgcacactcatcagtcctggtactcaagtgagtgtattgcacacacattactcctggtacttgtgtgagtgcaatgcaatcacatcagtcctggattgagttctaaatttatgtggaaccagtgtattaggtttattgaacaaacatttctataacttctatttgtttcagaaaatactaaaattattttaattgtatttgataatcttatagaaatggtatttgagtatataaaaattataaaaactagcatattaacctatgtatatggattcaaatggtcaatttgcttaagggtttattgaattgtagaaaaagaatatgccataaatatataagcatctttctatttgaaacatcaactcatataacgatggcagtgtagtattatactgattgnnnnnnnnnnnnnnnnnnnntcataactgtgattttgctattactatgaattgtagtataaatacttgatacacaggctatctgacatgcagtgtcctctggggtcacaagccacaggttgaaaaccactgttttaggtgatgcatgcatcactgctggccttgagcctgctgtcctcttgctttctcagttttgcagcaaatcttcatgtattattctttaagtcagatattttacattttgtactccttgttctatagtctgtgaaaatgccattttccaatcttgtagattattttatttgaaacagtcatatttttacccagaattttttgtgctttctaatcttgttttttatggattatctttctttcctagaatactagcaccttaactcttagatttccataaatactcttgaaacatgtttaaagaaaactcatctgtcatttttcttggaattctttttttgagaattttatagatgagtactatatttacattatccctcccacctgggattacaagtttttgttgttgttgtagtaaattaaaatcattgagtttataagtgattttgaggaaagttaatatctttatgatatttcctttctactcattaggttttttggatgtactgttaaagcagatacttagtttgacctattataatactaaatacataataataaaatgcaatttgttaaagatatttttgtctaacattaaatgtagttaaaattgatgtgttcacttgggacaagagtagagagtggaagacattcttagacacagacagtacgcatggtcatgagatttctgtctcaaaaactagtccttagcctgaagtgaacaattatattacattgcttttaaataagtccttgtaattagccacatgacttacaagtaggctttaatttgtattatatcagaatcatcgcgtctgcctctgctttaaccagccaggtgtcatttgtactttcagtcccttagaagattgttcccctaattagcagaggacttttttgagctccctgggttgtctgagatgacatcctgggatgtctggtttctccatcaggagcctacctggaacagctggaaggttattaaacaggtgctcctataacttctcctttctgggcacttgaatctctcctatgttcattctgaattttccatactgcgattttattgttgtcttctttttcaaaactctttccctgtctcacctttctgcctttggtttaggtctctctggaatctttttactatcaactccggaaagtgattttaagaagaaagaactcaatttctcttgagcactaaaatttaagagtatgcttcagtttgaatacagactcggcctatttaaggagatcctttgtgcctaactggaaaatgtttggttcttaaacttaccttgaggaaagccaggccaattgatgcacacccttaatcccagcagttggaaggcagacacaggccaatctggtctacataatgagtttcaggacagcagagctacacagtaagatcctgtgtctgaggaaaaaaaaaaaaaaaaaaagaccaaatgtatcttgaggactgaagatatgaaaatatctagctctgtgaagaggatgcatagtcaatgtgaatttctttccatttggtacaagtattatcgaagagtattattaccaacttttgtctttagacaatgagcatcggtgtgccaatggtctaagtgtaggatgacattagtgacagagtagcaaactggtaagcgaaaggcttaagagacagagttaggaaaagaaaagaaaagaaaagctcttttcctcagattcagttttgctgttcctttcatttaatgtcacacatcaaaattagccatacccaaagtccataaaatgtagtgaactgnnnnnnnnnnnnnnnnnnnnccagagaaaagccaaagttggagtctgcagaacagaccagaaactgccagttgacagttgttggcatgaagtgacaacttgaggggtgtgggaaactaagagtagtgtgagactgatgtagattcctctctacactccatgcttacacaaggttgtctggactaggttccttaaccatctcaccagttaagtaggacactgagactagagaagttcctggtgtgttagactcagtggagccaatcaagtaattctagatttccatagaaaccaatacaggaagtaattgaataaacctatggcctgcattggaatccagaccatctttctagtacaactcacttaacgttttgattttaattacaaaagagaaagtaagaattatgagacattttcacaaaaaatagaataaaagagtcatgaggaaaagtaggcattaaagggactaaaatgaggaaaagaaatataatatgatatgatgtaacatggaaaatatgtatagttagtagaaatgttctcagaaattaaagcctttgctaagataaaacttattagcaagtctgaatgataatagagagagatacagtaaaaggatgcatatgtgaaacaaagtgaaatcaaatagatatagaatatgaataaagagaaaggaaagaaaaactcccctgccgcccctcccaaaaaaaacatcatttgttcgttcagaaataaaaatagcagactgaagaaagaggagagaattatcaatatttcttaagaacctgattaaatttgaagagctgccaaatgcttagtaaaaataatgattatcccgattatttgggaagatagaatgtttatctttgttatatttccaattctgaaaatgaagaggactaaaatgccccagagcgagaaataagaggatttataaaaacaaattccctccaaaaatcaagttagcaatgaatgggaatcagactcatttctgcaggtcaggcttctcttctgtggctacagttaggacctcatgagaaagaaaactgctttgacttgtgattgtgatcagtgactgacacattagtatgtgaggcgagattaaaagcaatctgactcctgagaactcaggaatatactttggtggcctgagcccagtgctcagagaatgtcagatgaagggtgtaatgtgtatagttagggataaaaattattgacagtgtggctagaagcttcctgcaattaattataaaggaaaaattctcccaaacagtgaaggatgatataaaaatatcaatagttaagaactggagctcaacataattatagtgaagcatcaggattgtgttagaagaaactattagaagttttctttcctttcaggaaacaatatcctaatcaagtctcaaaatttataacagtgctatttttaaatgctagaaaaaattagcattttttgtaaaaatgaggcacagtggtcacttggtcgacctttgaatacacagtgacaagttctaccctctatatgttctgcttctacaaatgaagtgagactcttcagcagtgggtttctacatgtagatctttcacagtttgcctaagatcacggaaaaaaacacatatttatgttatgatacataagagtagcaaaattattattatgaagtagcaacaaaaataaatttttgattgggggtaccaccatatgaagaattgtattaaagggtcacagtgttaggaaggttgagagccattgctctgtggtttcattattttatttcataagtgtgtgtatatctctgtgagtgtatgcacatgtgattgtgcctgtgcatttgaataggttagaactctgtaagaaggaacagcagaatggtgataaaatggaaaagttaaattcagacatacacttattatgaaacgtacaaattaagaaagaagcagaagactaaaaataaaatttatgaagtataagggtccagagaggatggctttgtggttaagggcatgtactgctattgcaggagacccagattctcttcccagcacccatgttgggcagctcacagcctctggcttcttagggcactgcacttctgtgcacagattgatacattcagattcatacacagaaacatatacatatatacatgatttaaaaatatataagatactactagaaagatggtaatcaacttaataaagaatggcaatattagtattaagtaaattcttaatagaatttaacagaaacattgcgaagcaaagaagaggtgatgcatcagaatggtgtaatagttacttcagctccaagcccagagtcttatgataagaagtaagaagaaagagagcagagaaaaaaggagaacagagaaagaaaatgcagtggcaagaacaaggaagagtccagagaatagaagagaacctagaaaaggaagttggacagaggagaacaatctggaaaagagaagagaagaaaagagacaaagaagaggaagaaaacagcagagaaaagaagcgaagattgtctgcaaagattgggaaaaatgttttttcaaatgacagattttcaacagaaggcctttttatctttcatctagagacatgtattatgatttctactacaatttatgatctttttattttattttattttatttccccagttgttggcatggcaggactgaagaaaaaaaaaaaaggcagacataattattgaaaagcttcctcggtttgagggaaaatacaagagagaaacaattccatattttcaaagagatctacaccaagactttttcaggctgtcagcagataaaaacagagagaaaggcctgaagtggcaagattaagctgcatattgtgtaaaactgatctctaaaaggcttagttgcaattagctgagcataaacctagcagatcagaaagcagtgtgctaatggatttaaagtaataatatatatacatatatatatacatacatacatacatatatatggatatatatatcactgagataattccaatatatattatatatacttatttactaaatatattagtatccaatatattactactttgaatatatatttaataatatacaatatataataattgacatatatatatcaacatgtcaactggaaacagagaaaaatacattaatttagaatttactactgaacaggacagtcattcacaaataaaggagaacttaggtcattctcacacaaacaaaagctgaacaaatctttgactactagtgcttcctccaaaatacttctgaagggaaaacttaagttgaaaagtaaagacagcaaacagtaacccaaatccttatggaaatagaattcactagtatagtcaaatacaaacatcaatagaattgttacttttgttttcaacagaaatcaaagggaaaattcataacatgtttatgaatctatctgtacatttataatatataatatatatttatttttatatatatttattttgtgtatatatgtaaacaacagaggaaagaattcataatgtgtctttaaaaaaaagttaactaaaaacacaaaggaaaatcagtaatggaggaagtgtaacaagagttaaaaacctcagagatggctgagcataaaggtgcccacctttaatctcagcacccactaggctgaggcaggcatgtttctgtgcatttgaggccagcctggtctatatagtgagttccagaacatttagggagagaccctatctcaagaccaaataaaccagcaaaagcaagacctcctttgttttcttgtttaaacatagacagattaaactccaagatcaaaaaacatcgatctaagagcagatttaaaaggagtatctgactacatgatatctataaaagtctcagtgtagatttaaggatatgtgtaagttggaagtgaagggatggaaaaagacatcccacaaagatattaacaacaacaacaaaagaacagaggtattgtagaaggcaaaattgatttttaagtcaaaacctgctataagagtaaaagagggtcattatgcaatgatgtttttaaaaatagtcagtgtaccagcaattataacagttacaaacaaaagtatacaaacactgaagctccagacactctgaagccaactgacagaataaaaggggaaaccgacagctctgcagcagtagagggagactgtcttacctcagactcagtcctggacggatggtacaagtcgcagcagataggaccaagcagctcctcagagtagctgtggcagatgctctctgccaacagagcatcagcaaactgtgctttcctccagtacacatgaaatgttctctagagtagcattcacatattaatcagcaaaaaagccttaatacgcttaaaaataaattgttcagtattttattttttattggcagtagacaagacactagaaagtcagcagcagaaggaaaaattcaaatatttacaaatacctgtaaataaaacaacacactcaaaaccctcaactggtcaaagaagaaatagcagaggaattttgaaatatctttgaaacatgaacacataacttgaaaatttatgggatatagtgaaagtggaaataagagggaaatccttaataagaaggttttagatccataatcatacttcaaagaaaaaaccatttataaaaaaattaaactaatgccatagtcagtggtaaagagaaaagaaaaaaattaatccctaagttagaaaaaaggaagaaaataaaatagcttagaaaagaaaaaatagtaaaatatttttttaagaaatatgagattgggtctttgaaaatattgaaatattaactcagagaaaagaggaaggctcaaacacagaaatcatgaaaaagagcattactacctaacttaagaaatctgattatcagagtactgtgaacaagtttataccaacacattgaatggcataggagaaatggacactttcctagaaatatacaacctggcaaggctgactaagaaatagaaaactatgatacatgtgtatgtaaagagatgaactcacagtcacaatccatcaatgagaagccaaaaaccgaggatgttatttagagtcctacaaataatcaacactactgcaacattttccaaaacattgatgatgaagaatcacttcaattgtattctgtgagacctgcctgatgtaacctaatcccaacaattcaccctgctagagaatggcagaccagtgtccttgtacatggtaacgagagttcactagttgcgtgttcaggcagaactaagaagcaggttgaacggatgatacagagaaggattaattttggtgtgcaaaagactggtcagacactatacacaaatcactgtgatgtaccacactgacaaatgaggaaaggaaagtgctcagttacctcagttgatacagcaaagttgtttgacaaatttaaccatgatttagaaatcacataaaattaagaatggaagaaaattatcttcatgtaaaaaccatttataaaaaaattaatgccatagtcagtggtaaagagctaaatgttttattctagattatcagccacaaggaaagtcttcatttttctgccttaaaaaaaaaaaagaaaaaaaaaaagacacacgctgtatggtttcactattccactgtatggtttcatactgtatccacagacaatgatcatatcagtagagaaagtagcatagtagtgggagggaaacaccgaagtttgtaaggtgcttaaggcatgactctgatccctcaaccagtgtaaagaataaacaagcaaaacacagcacggggcattggggagtttgcctgtaatctcagtactgggaactttgaaacaggtagatagatagatgccctggggcttgttggctagacagcccagccaaattggcacaacaggccagtgaaagactgtctctgaaaaagaatggtgtctagggaatgccaacagttgttcttacctccacatgtattcttacatatatatacaccaagcagaatggtggctcctgggtactgctgagcaggggtggggaactgctgtttggtcagtaaagaattcaacttgaaatgaggaaagtctatcatattggttccaaagcactgaatctgctttctgtgttacatctgtaaactcaaaatgattaagtttgatgttgtatgtattttatcattttgagaataaaatcaaaagagatgtgttttattttgtttagaaataaatactagtgaaatcactgtggatcacttagttctcacattaatttatattttgatttcttctttagagattttatttgtattttaagtgtattaagtatgtacgtctgtatgtacactatgtgcatgcagtgtccactgaggctaaaaggggactttggatcacctgaactgtagttacagatggttctaagccagttcactgggtactaggagtcaagccttctgaaagagcagcaactacttttaatcactgagtcatctctccagcccctatttttaaattaatttcaaaaaaaaaactgaaagtgaatgaaaagaatggtataacttagaaaacaagcaagcaaacaaaaaagcaaagaaattatagaagaaattactatttttaacatgacataaaaattaaatcattaattgagaatacagtacaattttgaaaatggcaatacacagaaaagcctaagaggcagaaaggggactggtatgctagcacacacctttagtctcagcactctggaggtagaggccaccctggtctatgtagtaacataattccaggacagcagaactacataaggaaaccctgtccttttatttatttatttatttatttatttatttatttatttatttaaggcagaacggcttactaactaataatattttctttcagtgtaactgtgcagatgcatttagaaggacagaagacaataattgcacttatgtttattatgagccaggtactccatggcctccatgaattctctcatttaacttgatgctagtgcctgtcctgtcttactttgcaggaagctgagtcaaagtgaccttagttagctacttacttagattcatagaatggcagtttcaggttctgattccatgcaatcaagtaaaatccagagtgaaacagaaaccactgtccctccttcccccctccctctccctctttctttctctctgtttcttcctttctttctttggtcttggaacatttggtgtgactttgtattttctatttgtgtatttgtttttgtgtatatgtgtgtggtatgagtacttgttcttcaggagtgacaccttgtttcttgagataggatctatcactgacctgaatcgtgccaaagcggctaggcttgctgcccagccagccccagggatcctactgtctccacactcttgctaccacacctggtttttacgtagggaccaggatcaaactcaggtcatcatgtttgcatggcaaatactttactggtgcttaggtttgtgactttattcacagcatccaataaagcctgtttgagaagtcatagggaacagacctgtaggtctgtggggagtcagcatagagtagtaactagtgtcatggtaacacaacctgtgtcatggtaacacaacctggtgtcatggtaacacaacctagtgtcatggtaacacaacctggggtattaggcagctgagtgattcactcagacccaggagaaacatgtatgtcatagacatttccaattaattagttttaacaagattgattcttagtttggtgtttgggagggtacttttttaatgtttttgtttttagctcactttattaagatataattggcatatatatggtaaacttgacttactttatgtttacagttggtaagttttgatgactatgtgaaaccatagccacaattaagataatggatgcatcctctgccacaggtttccttgtaccttttgtagtctgtttcagttgacttagtgtttttaattttcagagcgtataggattggacagtgtagagacgttaaagtgcttaggctaatatccttgggcacagtggaggagatcatgtacttacgacaagtctacaagcaggtaaggatatctcccgttctatgtaagaaggtacatctgtctatttttagaaattaggaacaaatataaagagttttaaattttaccctagtatggaatttactaagattatcaaatatactcttaaatatacttctgtgacatagagtaattgttaagtttataggattttactcctgaaagcttcttaaggccatatttccctttttttaaatttatttttctaatttcatgtgcattgatgttttgcctgcacatgtgtctgtttaagggtgttggatcccctggaactggagttataaacagttgtaatctgccatgtggatgttggaaattgaaccaagatcctctggaagagcagccagtgctcttaaccgatgagtcgtctctccagccccttaagcaatatttcttaaacattaatgtgcatttaaatcacctagtgattttgttaattaagtaggtctgaggtacagcccaagaatgcatttttaactagctcccaggaatgccagttcttagtctactgatcacaatttaaataatgaggcacacctccccaaatgatgagccaaggtgtggtatgtgtgccatagctgagtttcaggtacaccgaggcattgatctcaaactcaacaagaatgtttaagctaccttacagccttaacaaacctcctcttttcacgtcaggctgttgttcctatgtcaccctcttctgtatgtgcctaaacaggaaaaagcattaagaaagtattagaggtaggaaagatacaccataggtatgctaactgcagagcacnnnnnnnnnnnnnnnnnnnnnnnnnnnnnnnnnnnnnnnnnnnnnnnnnnnnnnnnnnnnnnnnnnnnnnnnnnnnnnnnnnnnnnnnnnnnnnnnnnnnnnnnnnnnnnnnnnnnnnnnnnnnnnnnnnnnnnnnnnnnnnnnnnnnnnnnnnnnnnnnnnnnnnnnnnnnnnnnnnnnnnnnnnnnnnnnnnnnnnnnnnnnnnnnnnnnnnnnnnnnnnnnnnnnnnnnnnnnnnnnnnnnnnnnnnnnnnnnnnnnnnnnnnntctttaataatgtgtaggatattaaatttatgttccttttatacctataaataaaccatttattcatttagaactgctccatttgagaagctctggaatgaggttcaagtttaattataagtattaaatttgaattgctccctgtatatttggctggcatctatttaagaacaaacatctgtcacatgtggtggtcgttactaaaaatgatccaatcttaaaactcatgctaacttcttcattctaaaaataggatttacacagcagtatgtctattttcttaaatcatttaggtctgaaggaaacaatttggtttctggtctttgatatgacacaactacttgaacgaatttctattctagcttaaccactcgagaaaaacatgaagctgctccttaagacctgttgttttgtgtacttagactagtcctcattactgtttccttaatcatgtaagtgtttttcaacctattattacatgcactttacttttacccaaaatggcttattatgtactgtataataaaatgtaacaaaattttcaggagacagtgtaatttagtgtttagaactttatatgatatatacaaagataaggtagtgattatataaggaaaaggtgtaacacatggtttgaagatagcctagaacttgaaacaaggatgcatatcaacatacatatattgagcctcacagtctttggagaaaagaataaaaagtaagaaaaaaaaaccaactataaatatgttagaacacaggatgtttctcaagggtccagaaattgtttagggaacccttaaggacagaaaagaaagagacccagagatactcaaccagggggaaactaccagaaagtcagacacaacttacacattctgacattgcagtgtcagccactaacacaagaaaggactccttagagtatcaagtgatagacttgatagatgccttagcatgtactctgctctgctgcacacaatgcagtcaacagttgtctagtccagagtgaaagcaacaaatagaaacactgaaattaaacaaggaagacagctcacactttttactggcatgcacaagaaagtcactctcaatgcccagaagtacataacaagccattataggtaaaagtacttagattttggtaaaaggacttggaattgaatgtgctgtgcttatgtgcactgactcagttagtctgtggtttaaaataacatttatccagacctctgctccttcatttggaacaccatatgcaaccaagtttggcattttgaaattgtctcatatacctggattacatatgtacacacatacataccattttatgtagaaaattttacagaaaaacagctcacagaacttcaaacttgcccaaattttctgtttgttaacattttccatgtttgccttctccttcctaaagctattgcttttcttctttttctggaccatttgaactcatgtatcacagggtttctcagagatcatgtttacattttacgtgtttatattgttatgattagcattatgaaatagcagtagagagtgcatccatgtgatgatgctaaagtggcatacatccttaatggcttcatggttggtagtcttaaaactcttgaggatggcagttctagggttttacagtagttgtcactgtcattaaatatacagttagcttggtatccacatgtttattatatactttagattgtaacacaaggaatataataattctgccaatattagtttttaatgtaataattttaaagaagaaatgtgtattcagatgtcagcttacattattaaacatttataataatgtaaccttaattcaatgataaaatagaaaatgtaatatgtgtgctccaatgaggtggccagattatcattatttcaccataatggcaacatctgcagggaaattaaaacaaaatcttctccctaaggctatccagccagccccagctaaagttgtgtgtatgcagggagtgccaggaaattctgacatactgttggagcaaacacttcaaaaatatcttgtatttttctgttatagcaacttcactgtgtggtggttggaagtgaaaatgccaagcgatactttgaagcagtacaaggatcaaaagaacatcgaggagagctctttggtgtccacaacctcttcaaactaaggtcccaagggtcatgtcttacgagagacatcctggaggtgtgaagttgttctgtgacctcttcaataatgttttaagtacagtttaacagtatcactcagggattttgaaatacaattggcgtttccttttcagagaaatttttggtattccttctcaaaaatacatgtttagaatttctacatttaaagaagtgggaaatgaattttacctcaaagccaaaacttactcatggatacttatagataatacacatgcattatgagtccaatctgcatgtgagataatatgacctccgtgggcattttcagacagacagagttgagagggatttattagtttgaaaacagctgttgaaattgagaatttaaaaaaaaattaagattttttttcctaaataaacaaaactgtaaaatatgttttgattagaagttacaaaataccccctgagatgtactctcatgtctctgagagatttttttattttctgttcccaataaaaattccacaacaatatttcaaactctccactatgttcatgttcaatacagatgtttcttattcttcaaatgagacacttacatggctttaaaaattcctttagttcattaatttaccagaacactgagaatattgacctgttttccagctgatcttagtgtggagatcatacagccctggaatatcactttttcatctccttactacatagatgatgaatcagccaaggagagctccagattacttcccttggcttctgggactttgtagtaaaattcttaattgtgcttcatttagtaagcatcataaataaagttcaagaaaaattactccctgtctttgagcaatgacagtctagatggaggcagaggacattcagacacgggacatgtactgtcagtgttacatgttgctccaatagtcattcatgatgagcactggcaaaggtggaggacattcccgtaatggacatgtgctgtgagtgtcatatataatgtcaccatctctgatccttaaggacgagcatctgtggatggagagaagacctgtactgtctgtgtcctgctcagtagtgtctagtgttctacatcactactgactccaagtagttgaattgcccaatactgttgtgtagaagatacgaatagcacatgcactagtggcacaagctggagcatcacgctttgcacactcagcattgagatgcttagatggggcagtattattgtgtactctttaattatgtaagagcagctgatgcaggcagaattcttgggcaaatgtttgacacttttgtgccttccaacagtgcttttagtaaaattgaacacaggcactagttttgtatcctgtgaaactgtgagtttctttcttagcaaatgagaaagtattgttaagaatgcaaaccctcttacacttagcctgcctttgcttgtttttgtttgtttggttggttggttggttggttggttggttggtttttgttttgtttctgttttcttttttggttgttttcaccctgtatttacagctgtgtatattcttccttgtggaaattacagagggaaggccaagtggaagctggcatcatgacagccacaacatggttgaaaggggaaccttcagcacaagaactagaaacagtgggtacccagaaaataaggactgtgacatctttttcctttactcttttccttcattcttcagtacgaaaaaagagaaacttctaaaaactcagggatacaaagtgaatgaaaataattattacagtgattaatatttataaaaacaaattcaggagcagtcaatcacaaattaaacatcctgtgttagtgaacacaccagctttattatttattatcattattattgttgttgttgttgttgttgttgttttattaaaggacaagctaaatagagaaatgaccattagtgtgtatcaaaaccattctgtaaatcagagcgagtattgtattctttgagtctgtgaccttaagatctcatcattcttgagaccctatgctgtcaccagaggctcttttaggtgtaaggtacaggaaacatgaagaagatttttacattgctattcttgctgggtaatttgttgtttgttcttgtttttttggggttgttttgttttgtttctgagatttaaatttatgtgaattgagtggccttaacttaagaaactcatttttattcacctattttgtatgcataccaagttggttcctggggatcaggttcagtttgttaggcttggtgaaaggtgcctttccctctgagccatcttgctggcccaggttgatttttgttttgttttgtttttaatttagataaacacaaaagtcaaatattggcagaagtattagataactttcccaaaatctcaacaagttaagcctcaattttagggaactgaagcttttccttaacttggttactgtgaaaagggaattggatataattttgtagcaaattttcttcttgagacagggtctcatatagtcatgactggcctttaattccaggtaaagtagaggatggtcttgaacccctgatcttcctgtctatttttcaagccctttgcttttcttactgcaaacatgcaccactgcgtacagctcttcccttgtgttttctaatgtttctatctgcttttcatgtagcctagagaccctgactgtcaagaacccacagatgtttgtgagctctacagcgacatcagtgatgaggagtcggtgggccattccctgggaaagactgataaacacaaattctctgacaccagtagaactccaggcttcccagcacagctcactttgctacaatgtggattctctaagttgtttgaggcaaagtataagtcagaccaggatggcgatggcaaccctgtccccagtgacggaagttctgatgagcagcccatgtgtctttctgcagaagccagacaggctgctcgtcaaaagacttgggactctgtttgtacttcagaacatcagaaatcagataacatccaaactccagatgaaaaatgtgtttctgataaaagtgaaaagactttagaacagaatgtttcttctgaatctgatgatgagacaaaggatcactgtacagctggacatcattgcatgggacagggtgacacagagtcagaagacagtgatgtcatctttcccacacagtatcccactcagagaatccctaagaaccatatacgctttaagctgctgttaggtgaatctgaagattctgaagcagaaaaccctgtgaaagtaaatcatggtgatgacagacagaacagtggcagagggaatggaccagttccaaatctcttgtgtctcgagaacatgacctcaaaatctgttaggaaaagaaaaggtacagatgatattagcgatgagtctgatgacattgacatgttccccaagtcaagaataagaaagcaaagagccactacttccttgaaatttaagagaaaaaaggaaaacaaaaggaaacttgataattctcctgtaacagcaaaggaagcaaatcaagtgtgtgcagctgatggagaccgtagctctcaggttattgaggatttttcatcctcagatgacaatttatctctcagccacttgagtttcactaaactaagtcacagagcagaaactgtaaaagataaaatcagcttgtcccccaagctgcctggcccagataagaaaaataacacttttatatcaagaaaaccaccaagctttctaaatgaaggagttatcagtcaagagcaaatatgcaactcaatggataaaatattaggtaaataaacattctgaaaacatttctctaaataactgctttttttaaggtacatattctatgagagattgttcagttagccataaaacagctctaaaatcaagatgctgctttgaagcagaagtaatgaagtggcaggatacagggctggctacctacaggatagagagtgttgctgtatccctataatgcccttccatgtgaccggcccacactcatcacagcctttgtgtgccagacaaccaattattctgacatgtatggtcattccttacatatattgccaaggttttgtttacatgaatgtatattctgtgatggtatagtttagccttgtccacttcactcagttcatgcagtctgcaatctgtaagaatcctccatcctctcagtaccatagaatttacttatagtttctcacaatgtgcatttcgctcaccgttctctgcagtcagtcatgcttgatgtctttattacctgtgaatgagtaggatttctgaaacttcagtagtcatatagtatttgtatgtatgtctttgtattttatgtatatacatattacttgtaattatatatcttaatatatattatatacttatacatgtatgaatatgtatacatatatttatccatagttgtatatgatgatgaatatacttcatgaattatttatattttcatatttgttttggtaattacaaagttctctttcttgtctatatacagaaattgatttagttataatagtccataactgcttatttgttttgtcccatactacacaatagttaaaggatgagttgacatggtaccacagtaaaggctgaaggtgtatccataagagagcatttgctcagtgttattactacaagagcatcactagacacattcttttagggttttttttttttaaacataccattctatttctttccatctttacaatggatacattgtgtctaacctgccagagacattgttatgtctataagttcttgctttagtgctttggtttcactccctcctggtgtataggtaactagaaatactacagttgctttccttcctgtgtcaatgtctatacagcatctggatcatctggaccttgttttctagtaaattttttaagacagtgttactgggtttttttctctgccactcttgtgataatgttttgtgaatccttgactggcactttgttgagtattcagtacatagcttcattttcattccttccaataccgttgctgtccagtagttttgccagattgtgtttgtctgcattccaagtccatattctcatgtgcaagtgtagtttcctcttggtttctcaggaacatctgtgctgttgttagtcacttgttcacgtctttcagttgtccagatgatctgtctttgttgcctgtcttgagaattcatcactctaaaattaattttaatttttcatttgtctggatttttttgtcattatcgtgtttcttcttcatgtttcttctagattagtcttcatttgcaaagaacattttcttaatgtctaagtctttttgagacattctatcactcatttctaagttactctatgatttatattgttaatttgtgtcttctttcatgttcttaccttgtttaagatccactgtggctttcatctctttttgaacctgtcatttctggcaaggatgtctctgctgcttggtcctttttttcctgcttattgttgaatcctactattatgcccactctgattactcccctgccccccaccacattgcttctctttgtttgggcaggagcactggttagtgggccagtgtgagaatttatatagtaagcttactaactacagtgcctcctgaggccttcttctggtcccctcaactctggagagcagccgccttcccagaagctgcttacctctgggtggccctttgtgccttctaattctcttggaatgttgctatcctggggtctcctgttcttacatctgccatatgccacatatgccacaccctgtagctttcctcttccataacacagatgtggatactatattgcagggttcttaaccttcctagtgctgtagatctcttttctttctttcttcctttctttctttctttctttctttctttctttctttctttctttctttctttctttctttctttctttcttttttttttggtttttcgagacagggtttctctgtgcagccctggctgtcctggaactcactctgtagaccaggctagccttgaactcagaaatctgcctgcctctgcctcccgagggctgggattaaaggtgtgtgtgtcaccaccgcccggcactgtagctctttaatacagttcctcgtgttgtggtgacccccaaccataaaactattttcattgctactttataactgtaattttgctactgttatgagttataagtatctgttttccagtggtcttagttgacccctgtaaaagagtcatttgacaccccctaagggttgtcaacccacaagttgagaactgatgttttatagtttctattggcagattgcctccacttgatggtaatttggtaatttagggctcatggggtgtcttgccatctaattttgttttcatgtggtccataggtgtctacttgtattgtctagtcactatttgagttcacttgaagattctgagggaatgaacagcccctattcagactgcttagtgatcgttttggcattgctttacaagtgtcttacttaattcccataaatcatgtggagaactatgaaataaggtgctacaggactgagcagtggtggcgtgcgcctttaatcccagcacttggaaagcagaggcaggcagatttctgagttcgaggccagcctggtctgcagagtgagttctaggacagccagggctacacagaaaaaccctgtctcaaaaaaaaaaaaaaaaaaagtgctacaggcaccttaattgttaaattttatttatttacacattaggctttctattatagttaagactcgtttaaatttttcctatgatatatgtatgtatatatgtatatatgtgtgtgtgtgtgtgtgtgtgtgtgtgtgtgtgtgtgtgtgtgtattggtaccagtattaatccaatacaggattatcaactggtttgtttactagagcgaaattagaagcttaaggaattattacagtgcttttaaaaataatcatttgagctttgtagctgcaggtgtcagcggttggaagtagtggaattttatgtagcaagtaggtgttttcctaactacatgatgtagaagtatcttgtgttttgtgcttggtgattgctgggcagttcagggctaaaacagcagagtgttgaggacattgccagggctgtttgagggatattttacaggcctcagttctagcctcctcttttatgaccacaatttcaaaataaattattagagcctagaagcaaagcagtaaaaaaatacagctacttttaaaatctcttttagataaaagctatgagttaatttttttttccatttcctaaaaagctctcatcttgacattctttgggcatgtgtacaaaaaggacaaaatacaaacaataaaacaaagtcccaccgatcagacacagttccctggtcataaacccatgatcccttccatcagtgccatcaagtactcttttaaaggagcaataaacctccttacatgcccaaacattttgaaattaacaaagaagaaaaatctatggaagaccattaaccatgatttccacagacaaacatctctatttcagatttcaatttaaagtttgttacttaaatctcagcagctcttatattgttgaaagtagaaagtcatttctaagttggcctggaccaatatatttgaacttcttttccacttacttttgaaaacattgtgataataacataatttttttaaaagtttcagaataaagcaagcagttaagcatagtagtttatacctgtaattttaataacactcgggagactgagatagaattagcataaattgtaggccatcctgggctacagagttagcctttgtctcgagaaaacagaaaagataataattttaaaataaatcaagcatactcatgtgtcatgatgaacaactttaaccccagcactgcagattcaagaggaggtagatttctatgaattcaagactatcctggtgagccccaggccagccagggcgacaaagtaggcactgtctggatatagggaaagtggagcagaaaggcatacatgcacacatagctaggaggctgaagcagaagaatcacaggtttgaaactagcctggctatgtagcaagactgtctcaaaaaatagaggaaataaaaaagaagtatttcctgttcttagtgtgctgttgataatagaaccatattgcttcatagtgatgaattacgtgataaatattgttgcctcctagatggtgttcaggaagtggcttatatccactcaaatcagaatgtgatcggctcaagcagagctgagaaccacatgagccgatgggcaacgcgtgatgtgtttgagttgaagcagttttcccagctccctgctaatgtagctgtttgcagttctaaggtaagaaacattagtttttatcttatttctcacaaaagtttatcaatagggtcctctttacgccctcaaaatagctgttaaatctgttaagagacacagctaagtgttgaaaagccatataacataatagttgtaatcacaaatgtttggaatttgtggtgatttaaatgagaatggtccccgggcctcatatgtttgaatgctaggtccccagttgttgaaactgtctggaaggattaggaggtgtgagtagccttgttgaaggaggtgtgtcactgtgggcaggttctgaggtttcaaatgattctaaccatcttcagagttctttctctgcctctgaattatggatcaagttgtgagtccttagcttctgcctaccttagttagcacttctgcctaccctatcactggtctgcctgcctgcctgcctgctagcagcctccctgcagtgatggtcatggactctaaccctctgaaacgctaagcgccacataaaccttttttctttcatatgttgccttcattgtggcattttatcacagcaaagaaaagtaactaagacaaattaagtgacaaacctaaattaaaatgcccaataatactgagttgactaatagtttcactttttaaaaatgagcctatgtccccaaattcaaagcaacctctaagggttgtacatattaattcataaccctaaactactacttcttctatgaaagaagaaaagtatagaattcagtttcttccggtttttgtttgtattgttttgttttgttttgtttttgaatctgaaagatacatacacaaaattctaggctttcctattatcttttatgaaggattttcataatgttaaaataataaattctgtggatttttcctatttaagattgctgttacatggaaataaagccttacgtaaatataattttttgtttatatgtggtcattttcatcagaggcttttaaatatgtatccattggtgtattcatctagaagcttaatgtttattgttgtatgggtaggggctaaaagtacatgttgcatataacagtgataaaatgtaatgttgcttttaaggatgaagaaggggaaaatccctctaaactttccagctgtcttcattaggattcagaatgtcttaacaataaaaccagagtgcaaagtaaaactcatgactacagaaatatgagtttaaaagttgaggattgagagaaagatagactatggatggatagagcaatgtattctacttagatatctctttttcctaagttttaagatttatttattttatgtatatgactacaccatagctgtcttcagacacaccaaaagagggcattggatcccattcattgttgttctaaaatgaaaacagcctaactgtccttgagcagataaatgggtagtgaaaatgtggtacatactcactatggaatactactgaaccataacaaaaaatgaaattgatactctgatatttcaaaaccatctttgtaaagagctccttttaaaagttaggatatctggaatgaaaaccatatgtcttgtgtttcagttcatatcagaaagaaaggttttaaatgtctaaaggaatgataatgcctttattagaatcactgtgttcttttattacacagactgtatcaccaaactttaccatatctttggtgctatgtgtcagactctactgttcctgtggtgtgtgtgtcacagaactctacctgtggtgacgtgtgtcaaggacttcactgggactatggtgtgtgtcatacactttaactgcacctgtggtggtgcagtgcctcctttctcaatcagctgcatgtcctcaacttaagtttacttaaagttttctgaaaagaatgtacaaagacagcattcaattaaggattaatcactatggcaacagagatatggtgactaaaggaggaggatgtattctctcctgagtttcctgccagctgtcatagtcaacctctgctgcctgaacccaagccaaaatatagactgtgaccaactctaagaaactatatctgtatttttataaattggtacaagtatcagactataaaagaagacttaatcccctgaattggatgacagacacttggcactcctgccagcttttgacagaaaaataatgggttgctttgtagtaaaacctggattaatagtaaagccttctttatattattgcagtgttctgtaaatgagagaactaagcaagttgtcaggctgtggtggaagtgtctcttttataaccaatgcagatttaagtattgttgagaatactgtaaactcagactgttgtgttagcagaaacttttcttgtatatgtgttggactgacagcttggagattacttaaagcaaggacttgtgagctttggtgggtttgattgcagtgtgtttatacagcttgtataaggagggatggactgtttagtatgagcacgctgttggggaaggagcacacgctgtagttctacgtttcgggatcctgagttgtcaatggtagaaagtaatttaccagcttatgaggtagtccagtaggtaaagtttatggttgcagcatgttaacagaattaactcttagtaggatttttccttaagtctatttattttatctcaatattaactttatgtagctttatcagataggttttttttcccaagtataaaataggattaaggcttctaagattgctatgtatatgtatgaggttattatggtgctattggcgtaagagggggaatattgtaggtaacattcagttccacaaaaacagtgtgtcatctaagggaagagtactcatttattaagcaggagaagggcaagccagtgctatttgtacacataacctgttccttcttacaactagggtcaaggacaacctgcagcgttcttcctcttaatgtccaaaacatatacacctccttgccaaaaaggtgctgagattactcaaaacagaacgtatacttttattattgtagttgtgataattgcttaacaattacatgaggagtaaactcctctttggatctgtatagttatctattattactttttgctcattgtaccaataaagcttttagaatgctttataagctacctggttaattttattaagaacctgccctgaactatggctggtttcccatgaaaagggatagagaaaacatacatacgtatatacatacacatacatacatacatacatacatacatacatacatacatacatatatttttttaagaagctacaaccttagctaacgttggattagattaacaaaagtagtttctcttattaggaagtgttacaattctagcatttttcctagctggtgatccttattattgtagagagaaattgactttgagcaacttcttggtttagacggttgtaaggttttaataatttgcaaagtgtcatttcttcagaaaatgccttctggtaataggttagaagttcagaggtaaaaagcctcattgaactctcactgattctacctagtgaattaagggatgataataaacaatgtgcagtgctttttcaggctatattttatctctctgtaaaaaacatggtatccatcagacagacacttaatagaaacacctactgccttgtcatctaagaacattgcctctgcacacgaaattctgagttgttatataaacataaaatttgggaaataatcattacatttcagtttgaagagttttggggaagtatatctacacattgtacttatttttaaaatgagaagctaagggtctccttcaggccccagaaatggctgtcagcttccatactgtggcctctctcactgtcttttcttgtgttttttcttacttcctttggtctctgcttgaagctttcagatttgatttctaatgtttgacatattaatcttatttttctaatatatctaattttttaaaaatttattctaattggacctattaaaaaaacaagccaacaactagattgaattcatacttctttttaaaatatttatttcaaggaattaaactctgtctggactcaagaagttaaccaaggattggagatgtagcttggtggagaaagtagtgattggtgcatgtgcgtgagacctgagtttgaatccccagagctcatataaagtctactgtagtagcaattgtctaatcccggggctcccatagagagatgtgaagtggagatcaaagagttcctggaagctcatggctagttcctgggcttaggcatatccatgagcatacatattagctaacaacaaagaaaccatgcctagaggtaaaaaggttctcctctgacctccagataccaaacacttacaagaagcatgacaagactataaagagaatcaactctaccaaagatattttgacaaaggcatgattttactttttctaaacattgtgatggttagtattagttatcagcatgactagattaagagatgctaagaaaattagtagtcagcctctggtgtgtctttgatggatttctagacaattgatctggagattggtaaggtgaaggggaagatctgccctcaacatggcctgaactctggctagatgagaacgctccctcatgtcctgacttgatccttcctgagagggtacactgctgttgcgattgccagtggccatcagatattggcaattctttagcctttgaatgccagctcccatcaacaactctccaaggggcttccagaccttcagcccctgattggagctgcttcattggtccctcctgttctaaggtttctagcttcttagactaagcactctaagtgcttagtactgtactctctagttcctcacttagggatggccattgtaggattatttaacctttgtttaatcaagccagtgtaataaatccctttgtgtgtgtgtgtgtgtgtgtgtgtgtgtggtgtgtgtgtggtgtgtggtgtggtgtgtgtgtgtgtgtgtgtgttcttttcctttggagaacctgatttatacgtgtacttttcctttacctagaatactattcagctttgcatttatatcttccaaatctctctgccttccaaaatataccaccacaaatgtatcatctcttccctcggtctccactagtttcttccttacctggaaataaattgcccttccttttatgctttccttcttcactcagtggaagaactttgtgtggccaatgtttgctttaaaatatgtctttgagagtaatgatatagttgggttaagatttatctctttttaaaaattaaaattaattatttcccccttctctttcctccttctaatctcccccatgtactgtttcttccttgctccctctcaaaatcattgcctctttttctttacttgttactgctatacacacacacacacatgcctacaaatataaatacaacatcctcattctttgtaatgttcatcacatatatatatggtttcagagcagtagcttggtttgagataatccctgaaggtttatccgtaaggccacagtttttcctactttcagcattctttaggtgcctataagaaataaccttcaaataagcttagattttctaagtagcatgtatctgactcagttttaataacctaaaatgatatattatatatagttcatatctgaataaatacttttttcagaaaaattgtttagttttgtcaaggtctagtgacttcagaccctgttttggtcttaaggtgtctgtcttgcaattggtttggttttcagtaagggagataaatgcaggccatttgtacttgctgagcagacatacccaccaagtcttacccctacctgtgttctaaacactttaggtggtttgaatcatttttctatgaacaattttataattttcccggaaattgccttagtcaacgataacactgagtgtatacagaccagggccttctatatggatgagaaattgtgatattctgacacacatgttttggttttggtcactgtttggctcataatgccctctccaaagtgggttctagatacccatcttccaccaacacttttttgtcttagggccaacttacagaaattccctgacttgaaaccctcattctggaagggtcctgtcccattcctagaggaagaggctgtgaagaacagtggagtagataggcctcgttggtgtccccattcagcctgctagtaattatgcctgtgcagtaaaacacccataaaacccaaggagagtgggttttgatcttctgaatcgctgagcatgtggaggttactgtagtgtggcacacccagagtaggcatgggtgctccataccacaccccccacaaatttgcctctgcatattgcttccgtgtgtggaatagcctcagtaataaactagtgagcagaagtgagtgctttcaagttttgtgagctgctctaacaagcacagctgtgctaaagtgaggcttacaattggcatctggagtcagggaatcgctagtcttggagagatggtgccagaattaaattagcggataccaactgtatgcttactgctgctttctagtgcagaaatccctacacactgagagcagaagcctcagtgtggacagtagtgtaagacgagagggaaaacactttgctttgcttaaacatggaaatactctcagatttgtgtgtaaccccatgcctccaaccagacctagtcttccaattcacatttctcaatgcaggtcatcattgccgacgtgatgtgaatttcctgtaacgtgacctcatgtgtgtctgttctttatgtatgttacaagacttgaagacaaagacagtaacatacatttctaaacatggccaccaccacttagcaacagcaacagagagtgggcattcagcacatgcttgttacttaatcccacattaaaatacagcataaagcagatccctactaccattttacagtaaaactccttcaactgagctgctcagattaaagcggccatggtggcaggtaatgcagaacaattagtcaggtttgagcagcatgcgtgcttattatacatcattgttggtcatagtgctggcaaaggaagcctgcttaataaaggagcatgtagagaattgagtaaggaagatggcctgcctatgtatggagctacaatgtgacttcatcctctgtctcccacagttctgtgaaattccttcttctccttcttcttctcctcctcttcctcctcctcctcctccttcttcttcccttctcattttcgttctccttcttcttttacatttgtttagtgtgtgtgttttaccatgtatccctccccccccccccccgtgtgtgtgtgtgtctatctgtatctgtatctgtgtgtgtgtgtgtctgtgtgtgtgtgtctgtgtgtgtgtgtgtgtgtgttacatgtacatggagcttgaaggattcggttttctacttccactgtgtggggtttggggattgaactcaggtcattgggtttagaagcaagcacctatgtcttctgagccgtctgccaggcaagttttgtgaagtttcttactacagactgggtatggagatgcatatctatatcatgccagcactccagagtctcaagcagaattgtaagttcagtaccatcctatgctgcgtgatgagttttaggctagcctaggatcctgccgtaaagccaacacacaaaataaagttgctttagattgcagctattgtaccttctgggaggaaaggagctagagtttccaacttcagtcccctcttcctctcacaacatgtttgtgttttcaggcctgattgtcagttttgaacatatgcagaaaatgtggctttggtatatatttgggttcaatctactaaccagttggttttttcctagacagtggtttaaggttcaggagtaggttttagccttaggtttttgttgaatacagagaccctactttatgataaccttgcataattaatttgaatatttttcactgttgcccaaagatcgttaaacagttttatcactttagatccagctgccatttgcatggattttctttcactgttctgtctgttttgatagctctcccagttccttgcattgcaaagataagcgaatttatgcctttgtgtgtgcttacagtttggcccttaaccaaagagatctctttttaagtcttttgtttgaacagatgtgtaaacaaaacattgctgcttcagacttcacagtttaaggcttgatgaaaacagaaactgaaagaacacttgatttgtattcttcgtggcatacttggtgtgatcaggatgatggagaggcagggccacacatgatggtgaccttagagtgtgcttagaactgtttagctttgggaacaagttgtaggccccagactttactggcataggcaggccctcagttcatcttagaaccagctttctgagttcagccttctaccatcatgactttccactgcctttgaaaatctccacttagttccagtttcccattactggctaaccacctggatttaggacatcagtatgactggtatccacttttcttgtgtgccctaaaaggaaccagcgccatagccagatccattcctcatctacctagtcaaagatttcactagttcctggtaacctgccacagacaggctatcctgtctgtgcaccactgtgagcagccttcctctgcaatgtgtaggatgaggtgagctggggagattctgtgtgctggctatggatgtggctccagaattagtcccaagagagattatccataataccttttctgtaaaatagaaactagaggcttgtcttagtttgggttttattgctgtgaggagacaccatgaccacagcgacacttacaagggaaaacatttaattagagctggcttacagttcagaggtttagttcatgattgtcacagtaggtagcatggcagcatccagcatcgaagagtgttctatatctggatctgcaggcagcaggaagagagaaaccccaaagcccagtgacactttctcaaacaaggccacacctcccagtagtacccatccctatgggcctagaggggccattttcatttaaaccacaaggctcttcatgattatcttcaaaagttagcatcacggtggcaagcttgtataaccacaaggccgaagcaaaagtacccaagttcaaggccagcttggactgcatcattagttctaaggcctcctgcagctatactgaaaacccttgtgtttaaaaagaaaagaagaaaacagaaaaaaaaaaaaaaacccacagttctttactctcctggattttaaactcttgatacatttgttacaggatgtggttatgagagggcctttccctgtcaaattctcatttctatgtaagaacctttctttagcagtttaccttcaaatttatattacattttaattaatgttaataaaaggaggttttgggttttttttaataaatattccctgaactatacagtgctgttttctaatatacacattccatatgtggccgaataaacagaaaaatgcaaatgtgatcatagagctgtaaggtagaaggattccttcctttgaaagtatactgacattaaagattgctatctacagttttcttaagcttttcatattggaaaatctgtagctttttttttttagttgagtctgcactgaaaaactgttgcttgagtaaaagtaaggcccttgacttaggtctattgctttgaattacagatcatgtactttactaaaggaatgatggctagtgagacagcttagcaagcaggtaaaagccagcaaccctgggaccttgtgatagaaaaaaagaactgactctgaaagttgtcctttgacctccacacacatgccttggcatgtgagtacaaaataaataaatgaatgtaaaaagaatactaaaaagataagatccagattatccaaggacatttgactgtttcatactgttacaggatgataaataactttcatggtatataaccaatgtaagcctaaaactatagtaagaagtgagttgttcagaattatgactgataagacctagtgtggactcatttattttctcaagttttgctttggagattttatttgtgtgtgtggttttgtttgttttgttttgttttttcttcctaagtgtgaaagggttgatttgagtttcagatttgtacaacatgcttaagattcaactgggcatgctcttatgtagcgtgagagagaagggcaggtgcacagtgaacacatccctacacaagtgccttcttagttcctgtcctcacgtgtcttttataatttaaaaatcacaagtcatgaatatatgcattagtctgccttaaatagcagttttatattttgaagcacattttataggtaaatccgaaaaatcaataatgattcaatagccttatcaaagctattgcaaagcaattatttatgggaggttttgaagtaaacaatttccaaatttagtgtttgattattggtagataggaagactggtttggccaacctacgtcagagcaatttcctttgtagaagggttttatatagattaacttttatatactgaagtttaattttaatggcaatcatctttgtaaagacagtacactgtatttaaagttttagtgatataagtaagactagggtccacataattagcttagcctactgtctacctttttgttttagtctaaaagtctaaaggtacaggagttttcccttattttcccacttccaactgactgttccatgtagactccacagtccaaagaagggcgagatgttccttagtgcttattaattagagttattactttactgtcctctggtaagttcacctttatgagtagcctcctggtttttattcagtacatcttttcatcggttttatttaactttgtgtttatattgaggaatgattgctgcatttcctaaatttgtgtagtaagttttattttttaacaaagattctaaaagttagatttgttctttttagtacagatagtatagtgaacatgcctaacagtgctgcatagtttatgggagtggtcctcaactagaaactaccaagtgactggctgttggaagtgggatgttctctaacgtaagagcttaacagaaattatctcactcaatctacagtaaacaagggtcttactttcatagttcctttcttgtttttactataaccatacttagaactcagaattttattatatgtaatagcagcttccaaaccattagtatgttagtgccttcaccttgagaaagtacttcaataatgaaaatgttttttattaatttttcttttgagatgatttaattttctttttcttttgagccaaggttttgttgcatagctcaggctggccgcaaattcacaaccctcctacctgtactcctgagtgctggaactataagtgtgcaccaccatgcccagcttcaagtcaagatgctgctgctgctgctgcttcgtcttcgtcttcttctactccttcttcttcttcctcttccttttcctcctcctcctcttccttgtcatcatcatcatcatcaactcatgtgtatgagtgtttttcatgcatgtctggtgcacacacaggtcagaagatggtattaaatctcctagaactggagttatggatggttgtgagccacctcgtgggtgctgggaatcagagccaagtcctcttcaagagcagcgactactcttgactactgagccatctctccagtcccctactcttgatatttttaagcagctgcgttagttacttttattgtcactgtaacaaaatacatgacagaagcaacttaacaggagacatattttggctcagagcctcagttgtcatgatgggaaggcatgtcagagttcgtggcagcagaaatgtgtggcaagtcaggaagagggggatcaaaaacagggccaggctctaacccttaaggcaaaccctaatagtctatgtctgtcagcaaagcctacattccaacggttccacagcttcctcagacagtgtcaccagctggggaccaaatgttcaaactcatacccctgtaggaggatttcatatataaactgtaaaaaaaattttagagaaaatattagagatgccaggtttgtgtctgtaattctagcacacaggaaacaggcaagaaaatgcgaacttaagaccagtatgggactttcataatgagttcaaggccagcctgggctacattttgaaacaatgtctcaaccaattcactaatcagtagaaagggggataattatggctgtgcagaaacaggcttttgctttcatcctttaccttttaattgcaaagttttccatccagttttaacacagtgatccagttgtttgcctgtcctgctctcccagagaagaaaagtgctttttaatctactttgttttaggggcttagtgttatctcattgtcagaacgccatactttcaggtcacgtgatctggaattgttctgttctggccgcacagtatcagtgcagctgaagcttcacgggcattgcccagctcagcttttatgacgagttcattatgctactttatgataaaacagtgaagccacctctatagcaagagcaccaagatttttataaattaataccgacttttcttttcaaaagtaatatgaatttttaaaactatataaatggagctgtgtaaaccagcagttcataattctttctgcttacatatactttaaggcagcgataaaatgtcctaggctcttctgtctgagagatgtgtggatactcacatataatacaccttacaaatggagcttcaaaaggctcaagagtacctttctctgtggtcccagaaccttcaaaggatcagtggatgctggcaaaggacccttagtaaggaaaagtcccctaatccctaagacccctgccatggccaaactctagagcccattaatgtttccttacctgctgacagagaattaaggttgcaagtgcaattcaggttgactcaagctgaccttgttgagttaactagatggatactattaaggacagtagctaactggccagaatcctgtgctgtgagtatctcgctgggcttagaaggttctcagaagaatctttcctggatgtacttgtagcgtggtgcaacgctgagagaagtgttagaggaagaaaaggactgcggtctgcatctgggagttaggaaagtatgggaatgaattgtcccatagagcctcagaagaaggaacataactctgccagcactttgattttagcccagggagacccatgtcagacacacctacagaaatgtaaggtcagaagtttatgttgtttcaagccagtaataccatggtaacttgttaaacagcaatcagaatataattcactaccttcattccatacttataattcagtataacagtgacagcacatatattcctgaactcttaatacagttgggctaaatacaaatttatgttctataacctaatttcaataaaagtttatctactaagcaatctgaaatgatgtctttttaaagtaataaaagataggatgtaaaattcatatgagggaaaatgattttctccttttaagaatcttgttttaaattgtggaatatgtcacaaaaatctaatgacccatatgtccagcatctgtgtttgtgaaggcagaattcctgaaggatgtataaaactggttctttagatgtgtataaaatgtgagctttgtgatgtcagaaagagcaattggatatacaattgaaaagagccattgccaggcgccatccctgcatggcttcagagatctcagcgtaagaggaagagatattggttggctcagctgctctttctaattgctttctttatactcatattaacattcttgtctcttaaaataatgaataatcatttctggtatcagaagctgtcagtaacttgtagccctcattttgtttctaatggaaataaatacataacatctcttttggatttaccttaaagatcagtattttcctctctttattgatgttttcagacaatttaaaaacctgatgttaaaaatctgatgaccttagcaaaacagccttcagtattactgactgacatcagctgtctgcctagcactgtttgtccatgtgcagcattgttgcttctgaagaattctgtttaatcttcagtagaaatggtttgtatacaagttgctttaaggagttggagagggcgtgaatataagttaagttataagtgttatacaagaaaaagaaggggctaaatgtacatagtttctatatggtcttctatctctggaaaatatggcttcaatgtataccttagtgtctttgtagcagctgcatatatgaccttgagatcacaatcctgcttcagcttctcaagtagctgggcgtacaggcatgtactacagggcctggcgttagcaagtgccaagctgaagttggactgctatgtgattataggtgatggtgccttgtgtgccttgtgtggtgttgcaatgtatgctggatacattgccctgttctgtcaggtagcaccagttagaagtcttactttggctgattctttttccctctctctccctccagtaggttttagaatgtttccttatctgtaatctaaaggaggacatttattttcatttttcctagtaaagatcctctctccttttttttaattggaagttttctttaatttttttgccctataggtgcattatctcccattttctctgtcctttccttgaatttcaaagtatgttttctatctcttctccctccaatcctgtactacattctaagtcactttattctcctagtttatcaactatcattgcagatctgtttattgactgtctaacccatgtattgtttctattttgttttaaattttttcttaaagtttatgtttggtctgtctcaagtatacttatacaatgccttgctggatttttttgtttgcttgtttgtttgtttgtttttgtttggttatttaatttttccagctaagttctttggaagtgtccttcaattctgcaatagagttctcatattgggtgcacctgtggcttaacagtggtgggtttttagtgttctatgagtttctgaattctttccctactgaatcacaagctttcctatactgttccggtatttgcacctcattggactctggttttcaatggttcttagccagttttttatgtgattttcagcatagcttttcttactacacagatgtacaaaatcagattttccagttgtcacccactggccattctgttgtctctcgtcattctttatgtctagagaaagaaggtagcccccgcttctgttctgtgtacctgtttaggtttgcctagctttaaaactttaaatcagcagtccttcttgccgggactaaaaaacttgcatgttttgggccagcattttactattgtgctacatcttcagcattgctgctgctactgctccatgtatatttctcatatgggcaacggtatatatgcacatagtgtcttgttgtccttgggacagtgagccctaggatctccctgcttcctccccagcatccggattacaagtgtgcaccgcactacccagctttgatgagttctgtggatcacacttggatcttttattattagtagaagtattaatgcttttatttagttaagaatcatgtgtgcatatgtgctagtgccacagtgatcagagagcagttttcagaaattagttctctccatccacaagtgatttttgggaatcaaaattaggtcatcagactttacagcaagtacctcacccctccaagccatctagccagctcccagtacagatctcttgcttgtgcagtaaacattttgccaatgaagctgtcttcccagcctgtttctttgtttttttttatttcagggcattaagtcatatctaccctccagctccattacaggccctcaggctgtgttctaacctgtggatgctgggcttacattcattgctctgtcatttctttggttttggtacccagaaggcttgatttttctcacttttaggcttaaatatatttttgttgttgttgtaaatttgtatctttatttttatttttgtaatggaatagaactttccacctggtcacacttatcatttagattagatgcatataacattttttttccttatccactattttatgtcaattcacaaacaaacagctataaaattattgtaaagtttggttttctttataccttacaaactgtagacaatattttaaaatattaaatatgctgtagcctacagaggttgacaagtaggactttaaaaactggttttcctttttgttacataacagtttatttttctagtttgtgtgcttgtgtaaaattaaatacagattgcatgataatttttagaaaaacaaaattttaaaaattaggtgaactatttttggttttatttttttaaatattgtttatggagcatgcatgtgtgctataacatacatatgtaggtcagaggacaagcctctggtattggttctctcctgccttgtgggatctaattaatagggccttatacaagaatctcttcctcctgagctgtctcttttgtcctgtcttatttgttgagattggatctcaggtagttcatgttggcctagtagccctatattgttcagaataaccttcagtgcctgatccacttacctctgcctccaaattgctgagattgaaggtctacacaaccacacctgacctagacagaccaattctgaacctcgttcatttaatcattggttattatccttagggtagtagcgatcagccagtgtgtcagtgcaactatagccttgacagcagacaataccacatctttctgtattctgtccttttaatgacctacactaacatcctccaatagttgcttcagttgggtaacatgatctgcttcactataaaaagtgtctggaaaataactgtgacattctttgtcatatcaatccaaaactggttttttcttcaggcttaggttgtacttcctcttatttttcagacatacaaaactcaggtgaaggcaaacatagtgtcacctacagagaaagatcaaccaccaagtgatggaggcatttcctctcctctgtacgtatcccaccctgtagtccagaaaaagaaagatgtatatcgtactaaccatactaccttcatcattggagaaacaccaagaggaatccgcaggtatgtttgtctgtgtctagacttcaggtcaattctcaaaagaaatacagattcataataagatatgcaatgtatagttatacctcacatccaaacttcagaaaactggaacttttatatttaaaaaaataaaagcaaatgcttttgagtcaggatttcactaaatagctcagattggcctggaatttggtggaatagtccaggctggtaatatgaatatcctgccttaactcctaagttctggaatcacagagagtagaagtatgggacaaacatggtatcgaggtagtccccaggggccagctgaaataatgagtgaggcactgggatctccgcacacagttattaatattaccaagaatgatgtcaagagatggtggggtggcacagctagcctggttctcatggcctctgtgggcagtgggaatgatacctgttctcacttacagttggtacctgaactgcctggaaaaggagtagtgagccccacagtaacccatagagctggcacaaggcagcaccttatcctgccctgcttgcctggcaacagacttctgcagggtatacttttttattgttatcagtgattcttctagaagactcactttatttccccggtctttaaagacacatgggtcttggtccctatagtgatgtctgttcaaaaggaagcaagtatagcactgatgttttcttccttcctttcattgttttctcatcccttcctgctgccgtcacagtcagtcagagtcgaagctgtaccttgtagtaactgagtgataaccttctagggttttcaatacatctagcctcagaaagcaaggtagtgacatggtggtgtcagatatagtccagctccttcccactcgggaaagtgctttcaaatttaatcatcatgacttctggtagacatgctaatggattcctaacttggtttttattttcccttttcttaaagctactctaccatttttttttcataagagtggttagcttatgtttctgttatactttgcatttccttgaattcttaaagaaaattctattgaagtcccagaattaggaaaattagtgggaaggccaaaaatcattctgtaaaggacagccataagcataactcactcaaaggctccttgggttaagtagccttgaagcatcacgcctcccaggggacctgccccagggtcacaggtgaggctatgtgttgtcttagcgcaaaagagataaaattacttggcatctgctgaggcatcaccaagtcttggataaattaaagacattacctaacaccccactggttactaaatctttgtaaataagtacaaacacttactgggtcctagaaatggatttgatgatgagtaagggccgaatgtagcatcctcttacttcatttgacattacaatggaaccatttaaggacatacttgtgttccaacaagaacattggcagtttccaggatagaattggggtgggggtgggggttactgatggaatgaaatacattgttgttggtgggtataactgttgatcaggtgtggaacatatgataagacatgaatgaactccagaagccatggcacacctctcagccacaaaagaatgtgggcactcatcttaggctgtcactacaaccacaagagactgttacctggcctgggaggcagagacaaatgaacaagaaatcacaaaaagcagtggtgttaatgctcctacaaacatacatttaaaacaacattgttttaccctaagaatgttatatgtaggagaaaattcagccttaaaacccaccaatgaagacctgtgattgctggccagttctgctttttcacctgttctggtatgttctagatcccatgagaactagttcttgagtggttcttggctcatccttacctgacaggttgagatgacagcagagaacctccttgcctaccagcaagtactcaggtacccactgtgagcctgtagagctgaatttaccctgcatcatgagactacattgactgcattgcttccactcccttagcaagacagaactttgtgaggcaggggactgggtctgtcttgctattgtatagtttgtacagtggtgcttggacacaacaggactctataaaaactggtagacctgttgtataaaaatgagtaggacctttaacatgtgcagcactggctttggtttttttgtaaagacaattcaatggacactgacctctcacaacttaaagcccaaacagagcatcagaaaaaaacaaaaaaacaaaacaaaacaaaacaaaaaaacacatgtgatctgccaagcctggctcaaaactcagattttaaaaacaccattgtaccattgtgctagttctttctctcaccctaggaagacttgacgctgggggattccatgctctctccccataaccttacattaatcatataggtacttttgccagtactctaacattggacttcagtgtggtttaaggagtaggtacaattcagagttcaaacccttccctgtgaaaagcagcagtctgtggctcaaggaacctaaattttctacctccactttacctggtttccagaaggctcatttgtgtgtgtacatattgaagtgtttgttgggatcttattcaagaatggcaattcacttcttcaaataacctcttactctttttgcttatttgcttgctttgcttttgaaacagggtcaccctgtataaaccaaactaccttaaacttttcatcctcatgcctcctgaggactaggtttgcagctgtgcaccaccatgcttagaaagtagtatctggcttccaagattagctgtctgcactaaaggtgaatcaataggaaaaaagaactacacttacagagctttcttttaagctcaacaaagtgtcatgaaattctatactgtgaaagaaaggaaattttaatttttctcgaattttctgtttaccaaagccattctatttttaatttgttatgtatttacttagatgtttatttattacatatttacataattatttaaggagagcttgggagacatttccaaagcaatgatttaatttaaaaaagaaaaagaaaaaaggaaacattgagattttacctagggattctgggtacgttcttatgcaggtttgcttgctcctaagtctgctcagctaaaaccaaagccattctttaacaatgttattctatgggacttgattgctatatagattcttaaatacagattgtataagtgatgattctcatgttagtcataaattggctgactggaagagtaacctgatgggctctcataattcccaggaaatatataatagtataaatcagagttacctaaaaagctgatgacttagtgagctcaaagaccatttcttgtagcaagcactggggaagagaatggagttaagctgatgttgtggagggatgaggcacattgtttgacctttgtttacctttgtgtttcctgtcactgctgacgagcacattcagtaagtgcaggcacatgtgccacaaaatgtgcctagaggccagaggacaactttgtggagttgacctctttcctccattacataggctctagggactgaacgcagcttgtcacttgtaccttgttgaagcatctcaacagcttcctgataaactctttaaaaataaaatgtaatgtaattttttaaaatgaccactggctttgtctgtcctatctttagaaagcagtttgaagaaatggcctcttactataagctgcctgtaaaggagtttgctgaacaagttactagggccacatctgaagagcgacagaaaatgctcagagacttctacagtcttcagcacccagaggtaaaggagttctttgtgaattctgcttcagaattgataaaatctgtccacaagaaagaagagagggtgaggaataaatctaaagaaaaagaatctcttttaaaagaaaacccctcaaatgatagtactttatcatgttatgattccaccaacaaaatgtctcaagtttacaacagaaaaatatgtgaaggaaaatcagtcagatctcagaatcatgttttccatagagaagacacattttctagtgatgcagagattaacaaatcacctgtcagctttactgaagagcttcacagtgagagaaaggaccacacacccaaggataccacaacagtcttctgtccaaacagcaactctgaagccctggaggcagagctaggaaattccccaggacgtcagtgggacctcacaggagcatgcggttcaagaaacagaccacttttcaagttgagaaacaaaagggtagaaaacccagggtcagaaaacactcctgaggatggcttacttggtgacacctctattcttaacgacctctttaaaagccacggggaaggtcccacacagctgccaaagaatgttctttcaggacctgtggcaaaagcaaagcagaaaccaaaagatttctgggacatcttgaatgagcagaatgatgacagtctcagcaaactcactgacttggcagtgatagagacgctgtgtaccaaagcacccagtacctcagcctccaaaaggaaagatgagctggaagcttccctttggaaagcaaatgagaagtttttgtggaagacattaagctcagatgttgacgatgaaagcataagcaatacagagagagagtaggacatggacgtgccattaacctagatattgatgagctgctggccctggctatggatgttcatgtatggggcacactgaacatttgtttacaaacttgtgtattaaattattgctttagtataatctaaacagcctagcatgttatcatgggttctttccctaatatctgttttaatcattaacgctcatgtatgtagtttatgtagtactggaggtcaagcccaggactttatgcaagcactctgggcaactgagctacatctcctgccccagatttggtcttcagaacaaatgtaattgtatcatattgtaacgtgtcataatataactattattaactggcatcttccctcctgtgtgagtccgtggccttacgtgagtgacttgcccattcattatctgaaagataaccgacacacagccttccacttttaaactccagaatgccccaaagtcaagtggcagccactgccctctcctcattggcattgggaacttactgttttccttcttccttggaattatgttctattactattaaattattttagataaaagttataatgaagactcaacaattaggactcaatgtatggcattatgttaaaaatgctaatttttataatcactcagagtttgtgtgctgtggtctaaagaaatgggatttttatctttgcccaggattccgatgccttaacttttcacattactatgatttagtaaatataaatagatttatagcctaactttgtatttcttaagtaaaaggaaatgaataaacatttgattttaattgaaacctctttcatcgaatttaatatatatggtttacacactctgatttattcatttagtacccctttcccagcttctctggtctgtgataggtacggctatgtaggtgacagtggtaagagcagcagtgtaggtgacagtgtgttaagtgacagctatatgtaaaggcaaggaggtcctatctgtaaagtttcatgttgtatagctcctggcattgagactggcacattgaagtgtcaggctagtacctgcccacattcagctgagctcacaggaccatataggaactatctattcagaaaacagcaggctctccaggtctgtctctctctgtctctctctcactctctctcactctctctctctctctctctctctctctctctctctctctctctctctctctcacacacacacacacacacacacacacacacacaggaatactttattactttattctgttactacaagaaactcatgaacctcttaccatgttggaacacagcatttgaggtaacttgaatctgtgtcccagggccggccatggtcactcacacttggcagctggagcatataggggagggagagctgtgtttgcatgggcagaaatcagtgccccgccccccagtaaagcactcccactgatggaaacaagaagaaatgggctcccaagggcttctccagtctttggaggcctctagtcccacaccactccccggggagcatgaaggggcccttttagtaggggagcaggctttggattagccaaactaagaactgttgacagattaacctcttgtgtatttgggggtacacccgggttgcggagtaagtcagaatcagtccagagataggtttgacactcagtaggcagctgaccatccgagggtaggcaaggtgcaactcctgggcttttccttttctgcctgcaacaagatggaccaccgccaaatgagcttggccgtaccctgcggacaaactgcagatactgtgagccccaaatgaggacttctctgtacttccggtggctggcaactcccggaaaaggggccacaaagcctagcgctgctctccctcccacttggcaggacagagcatctaccctaaaagagaagaatggctaatggaattatgctttggcagtagcgacggaaaactcctgagctcaagccagtggggggcgcgttatctgccaccagccgaaagccaggcggcttcccgcatccctcacagcgtgacgccgtgggtggtccagctttggtagtgcaggagcttaaagaactgaagccctaaagcaaggggacgccgtatgtcagcgatcctgtggagtccctatagtatcctggcaggagagtggggatggtcacctagtgcggtgtcagtcaagagaccaagcgagtatatggacagtcaataggcaggagcaggtggggacccccacggggcacagcttggcacagttgactgggcgagtgcaccccaggcttaaatgttctgaatcctggaggccagaggcgccggtttctgctgtctaaatcactttcaactgatccccaacgcgcagtcttgggaagctgccagacgaaggctccccccttcccgcaagcacctagtcagagctgcaaagcagagctaggaaggaagtgggaaactggcagggtggaactcctggccggttccaggctccgtgttagcgagggccgcggggactcagccaggcaagcctcacaaacacacagcaggctggcccaggaggaaatccgacttagcaccttggcgaactccacctaagattccccggccagctgccccgggaagcggccccccacgtccagacgcactcccccaagccggtgcacgtcttgcccttgcgcttgttggacctgctggctgggcctccagtccttggccacacaccctctaggacaggccctgcggttgccttcactgccctcccaccttcaagcttccctcaaagccagagccttctgccaagcctccattcccaacctgttatcacgtcctggagagaatgtctctgaaatagttcctgaatcccactgccaagagcctgagtttctgtccctccacctcccatctggatgcctgcagacttctccctgggttcccaggcttcggcctcctccctctctaatccattttccacactgcatccccaaagcctgttgaaacatagggacctccgctgtagtaaacctctcatttcctctgttagggagggtaaaggggattgggctggggaataactacatcagttcacatttattgagcatttacttagtcgtttgtttaacattttcaagtgcttttcacatttaatctgccctagagctctcccgggcaggtgttatctgttttattgaggaagaaacttaggcagagaggccacacagccctgtattggcaatagctgctccgactgtttctcttctgagaatctcccagaagcaccaggttctagttagtaagtagaccaggctattaagtcaaactagcacagtccccgacatttggcttctgaacactagaagcccaggtcattacattattcttgactaacactgcccaggagatacctcatgactgactgaggcactcttctgtccctccttccaacacaagctctttacagccctcaaccctcctacctgctcccccacccccccatgtttttgcatccctgcctgacaatctctggccatgtcctctgcttataaaagagtcctggttcctattgttctgggaggagtgggattccagtctttaatttgtggctgggaaatctagaatcaacagtgggccttttccagtcctcctcccacccaccctaaaaaatggcatcactgagtccctagccctatttttcccacctaggagttaacaaaggctctataccttgcctgaccctcactgctctccagtggcctgaaacagagactcgggatagcagtgagtaggagaccttgatttggtagctaatgtgtgcctctgcttctggtcacctacatgtaatagtgcttgagtttgtttcttctggcatatgtgcctattagcagctttccaataaaaactttattccttttcttatatagatccataataggacaaagatttggttcccttcagggtgcaagtactatcatcctgtcgttcctcaccagcttctggtagtttttaaatttgtttacttattttgagaggatctcatgtatcctagctggtcccatggtcactatgagcgaatgatcttgggctcgtggtcctcctgccattagaggttacagaactatgtcgctatgtctagctaatcatcagggtttcttaggcatgggcctcacgattataagcctacttcttagcaactatattttcagtgctttctgaactaaacctcagctatataccaagaaatatgatgctgtttcagaatggagcactgagccccatcccatctctggttctgttatctttttctacttgcttaactaaaaaggcactgctgggaactaactataactcaaggctgccttggatctgggcgatcctgggaggagaggcaggccagtagtcttgatgggaaaagagaactcaactttgaaagttacaaggttgcaggattcctggttacaattctgtccagggaaagagtctacagggctatgtgcctggcaaagagagaactgctaaaaggtttgtgatctaacaggtctgtggattttcctgtccactgatattttgtatcagcatatgcctgtggcaaatagtttgaatctcaggaccacttagtagcttcaccttagtcccttggctgatctcaggatgcctcatagtctgtctggagcagatgtcttcatcatcaagtcagcaactcctgctcctcccgtccttaactcctgactcagtgacagcagaaactgctggtctattcatttttctccccaaaggttcctctcaagaagccaatcaatccttggactttctctgcttaaggatcttttaatctgacccttgcttgttcaaagttctaccaccatcactgtccattgaagatcttccttttttaggcttcctagagaaacctattcttttgtttttgtttttctttttcttttaaattttttatctattctgtggtgatcccacacataaatacaatgtatttagatcacaacttccaccccaccccaactcttcctgtagcttcttctttgccattccaacagaaatctattatttctaaaatttgtccaaaaacatcacaagatagtcgctggtgttactgcttaaggtggggcttgataaagtagagaccatcaggcctgaggtctgcagcacttgcaagcaatgttgccccatttccaaaggctgacttaatttctctatgctaaaacatttgaagtcctcttttgtagttatgtggtttagataaggtctggcgaaccatatagattgaactctaaccctgtgtagctgaggatggcctcgaactgataccactccaatttataacttaaatgggcatggaacccaggttgcaaactatgcaagtaccttatcaactgacctaaattcttagtcaccctactcttcaactgatcaccagaactaactctgatatcaggtagcagggctaattgggccctggaggttcttggtcctggagcagagatggacagagacacaaagcaaacaaagcacgagactttaggaaaagatccattccaaggccagagcaggcaaaaaccggagtttagcagcttgggggcttttgtatcacacatatcagccagagcagcttatttgcattgcatgggcttctcctgtgcacactatttgtagcatatagttatacatacagacttcatgtggtgcaggtctgactagtatctgaaatgtccagctaggttatgtgtgttttagttttggtggccgaggctgagagaatgcagggccttctggccttcatctcccacttttctttttcctctttgcagttactgtggagtaagtccacagtactgtggagtaagatctcactctctagctcactctcttgccttatctccttctgtctaaactttaaagatgtatttatttgtatatgtatgagtgcttgactgcacgtctgtgtgtacccctcgtcctttcggagactaggggatgacatctgaccccctttgaggtagagttacagatgattgtgcactgccacgtgtgtgctgaacatggaaccaaggtcatcttgcaaaagcagccaattctctagatggttgagccatctctctatccctactcctgcctaacttttctttgtacccactgcccctgttcttcccttttctctcaatttgatatgagcttttcagcttacacctcaaagagcaaagagggagcacccaggcacacagtgcctgctcctctgtacctgacttatcccacttagcatagctcctctgggctaatccacactgtcaaggtgtgcttggagtgagtgagaggcacttactgatgcccttgatggttgcagagcagcccttcggtcagttcatctgcacaattacaggtcagttttttaaaccaagtgcagcccatctcacctgacccatactgccccttgcagaaaatgtctcaggacaaattttgccaattgagattttattaggatgattttattcttcagtaaatatgcaattttcctatgttgaggttttgtttgcattgatatttctatcggtaaagtttaggaagaataacgtttcaaaaatattactatagttgtaaagttgtcagagaacaactttcaggagttactctgagaggtggcagtcctgtggttaagagtctagtgggaaggcccggattggtggtgaaatatttttaatcccagcacttgggaggcagaagtaagcagatctctttgagtttaaggccagcctgatcaacatagcaagttccaggcagccagagttacatagtaagaccctgtccaaagaagaagaggaggaagaagaggaggaggaggaaggagtgaggggcgggggaggagtctagtggagaagacaggcttccgcagagggaccacatgagaacacggcacagcaaagggattcagatatagtactctgcagtaacaaccaccatggccaaggagtagccactcagagcaattggaaggaagtaaccacagggtctccctggtccctccaggcagtttatgctggtttgttgaagcagctttgagagattcagaaacaaacaagcatcagaagttacctgtagtacgggttgttcctggggaagcagcaacaactgtgtggagcaagttccttcctgccacctgctcagccaacagctcccaaggcccagctggcaaagcctctgcccgggaacaagtctgggtttggtgccaactgcacagtgcagagcacaaggtgaagcctccttaactggcataggacacattgaggagaagggagagtgcagcaagagagtgcattgcgcaagggccagtctgtgggctagctgctctgggtgatctctgcccagaagtacacccagcagcagcagcaagtgggtagctgctgttcagcctcaactacctccttgacacctgcaactgtgctttcatgtgctgttagcacacacagcacacatcatacaccaggagcacacatgctatttgccttccaccatacctgtcatacacaccatacaccatgtatacatagcatacaccagctatacatatactcaatataacaggtacacacatcacatatgaagtataaacaccagctgaccataccacacaccaggaacacacaccaagtatacatatcatataccagctaaatgcaccacataccaagtgtacaaaccacaccaccaggtgcatacaccacacaccaggtacacacaccacacaccaaggacacacaccatacactaagtacatatactatacactaggtggacacatactatatgcccttagccatgccatatacacttgacagctgccacacacagtctacacaagtgtagggcacctaggaagccttgagtgaatgaatgtatattgtttgcatggtgcagccatgccagggacccgaagtaacagactaatggaaatgacaaagctttccccattcaggtcaggcttgcaataggcaaagccttcctttgctctgagtgttaaaaaattaacaactgtagctttcccttctgggatgaccacagcctgagactgatggcctacagagacccccacccccacccccaccacctagtctggctgactcttcccccgtgcttggattgttgtggtagtggatgcagtgccctcagagcacacagagcccacccaatcctagcttttctttacctgtgtctgttctttttccactcccttgccacctgtgatggcatcaacaccaggacatcaacttgactacttctggaattaactaaaacccaagccgaccaggcacacctgtgagaatcactcagcatgggaagaccaacttttaaaatcccggtctttgaagtgggaagacctcctctttaacctgagctgcagcttcaggaaatcgctacgatagattaagggcacgcttcgtgttctgtagcaccagggagaatgtgcccctgcgtacgacagcgtgagcgacactgttgcctgctgaggtttaagcagcccttgtctgcttgttgggcttgggtggtttatctgcttgtttatgttgtggatgtataatgtggtaattttactgagctattacggagcaggccagagacacttttatggattctggggatgaagtgtgctacgattctttcattaggacagtggacactctagccaaggctttaaaaataaagagaatacagaaatacaagacaaaggtgaatggaacttctctgcctcagcaacatctcgctgcatcagatgagaatgagtccactctgcttcgatgcagctttgttctgtcccccaggtcacattggcactgagattcaaacaaacaaacaaacaaacaaacaaacaaaatgactgccttggaagtgaggagatgtcggagacctcctgtaactgaggccatggaccccttgttccaggtttgtgtttcctgagtttttgaacatcatgaaattttctgagtaaatgtttttctagtaaagagtctggagaggtcatcagagacaattatccccagtgcagacaccatcggaaaagctacccaaaggaagaatccgatttcaagagcaacagaaacgggccacaccctgactctcatcccaaccctgatcccccaccctaactcctaccccaaccctgacctcacccccatactgaccctcatgcctactctgatccccatccctaccctgaccccaccccacccccactctgaccttcaccccccaacctccaccccaaatcctacccccaccctaccctcaacaccatccctgcccctgcccatgcccctgcccctgcccctgcccatgcccatgcccatgtccctgcccatgcccatgcccctgtccatgcccatgcccatgtccctgcccatgcccatgcccctgcccatgtccctgcccatgcccatgtccatgcccatgtccctgcccatgcccctgcccatgcccctgcccatgcccatgtccctgcccatgcccatgcccctgtccctgcccatgcccctgtccctgtccatgcccctgcccatgtccctgcccatgtccctgcccatgcccacgccctctagttcgtagctcacttcaagtactacttgtctctactttggaaacacttgcaccaccatttctgcccctcagagagaattcaccagcaaccatgttttgttttcacagattttataatgcttcgaattggaggccttgtaggaactgcccgcttcagtgttagccagttcccacagacagacagtacatcgcctaagagtgtcttaagcagactaaccagtccagagcacacactacatcactgtgtggtgcgcacacttcccctaccctaacaagcaggttctcaacaactagggaccacggtgcagcccagagctctccacatcattaactactcatttggaagcctgctgagctgtggtatccattccttcccatgaaatcatagttatgtttgtttgttttttttaaatctaacttgtgtgggagtgggtgggtaggggagttggggggggtgtattggggactttttggatagcactggaaatgtaaatgaggaaaatacctaataaaaaattaattctaaaaattcaaaaaaaaacccaaaaaaagaaaatctaacctgtgtatatgttatgcacatgcatgtggtgtgtgtgtgtgtgtgtgtgtgagagagagagagtggtgtgtgtgtgtgtgtgtgtcagtggtgtgtgtgtgtgtgtgtgtgtgtgtgagtggtgtgtgtgtgtatgagtggtgtgtatgagtggtgtgtgtgtgtgtgtgtgtgtgtgtgtgtgtgtgtgtagcagtagtactgggtttgaacccagggccttacacatgctgagcagggtcttccactgagctatattttgggtcttagttcttttgagtcaaggattcactgtgttaacccaggctggtctaaagtcactgaatagtttaggctggcctcaaattcttgatctttctgcctccatctcccaaatgctggtacatttgatatttgcttatatacttatctgtttatttaattatgtattcactggggtgggggaacacatgtgcagcacatgtggtaatcagaagacaaccttgggttgagcttccagagatctgtctgtctctgccttccactgctcatggctgggattacaaatgtacatttaccagatgtacataaggagatggtgtaaacctcctgagtgtcgggcttgcaggcctgcaccaccatgcatggtatctgtggttttacag

SEQ ID NO: 288 - DNA, 2580 bp, Mus musculus
gcgccccccgctccgggcgggcgatgcccggcagccggcccacgtgccgtgctctcctcgccgccgagagcggcggggctgccgggtgcctgcccctagcccgatggacatctccgccccgcagtcccgcgcagactcccgcaaagctttgtgaagcaagcataaaatctattactgtggatggaaatgggaaaccttttgcagttgtcctgtatccagactttcaagaaaagacaatacctcttcaaagacttcaagaagtaaaatcaactaaagattactccagaagtcttatatttgatgatgaagatttagaaaaaccttatttcccagatcgaaaaattccatctttggctagtgcttttcaattatctgaagatggagactcaattccttatactattaataggtacttgcgagattaccaaagggagggggctcagttcctctacagacactacatagaggggagagggtgtattcttggtgatgacatgggacttggaaaaacaatacaggttatttcatttctggctgcagttttgcataaaaagggaactcgtgaagatattgaaaataacatgccagagtttttactaaaaagtatgaaaaagaagccgccttctacagctaaaaagatgttcttaatagttgctcctctttctgtcctctacaactggaaggatgaattggatacctggggatatttcagagttactgttttacacggtagcaaaaaagacaatgagctgcttcgtttaaagcagaggaaatgtgaaattgctctgacgacctatgaaacactgcgcttgtgtctggaggagcttaacagtttggaatggtcagctattattgtagatgaagctcatagaatcaagaatccaaaagcccgagttacagaagttatgaaggctgtgaagtgtaaggtccgcattggcctcactggtactgtccttcagaacaacatgaaggagctgtggtgtgtcatggactgggctgtgccaggacttttaggtagcaggattcacttcaagaagcaattttctgacccagtggaacatggccagagacacacagcaacaaaaagagaacttgctactggccgaaaagccatgcacaggcttgcaaaaaagatgtctggctggtttctcaggcgtaccaagactcttatcaagggccagctgcctaagaaagaagaccggatggtgtattgttctttgacagacttccagaaagctgtctaccaaacagtgttagaaacagaagatgtggctctgatcctcacatcctctcagccttgtacctgtggcagtggccagaagcgcagaaagtgttgttacaagaccaactcacggggtgacacagtgagaaccttgtgccttagttacctgactgtgcttcagaaaatagctaaccatgttgcactgctgcaggctgctagcacctccaaacatcaggaaacagttatcaagaggatatgtgatcgggtattttccagattcccagattttgtgcagaaaagcaaagatgcagcctttgagacactttctgaccctaaatatagtgggaaaatgaaggtcctccagcagcttttgaatcattttaggaaacaaagagataaggttcttctcttttccttttccaccaagctgctggatgtgctgcagcagtactgtatggcctcgggcctcgattaccggcgactcgatggaagcacaaagtccgaggaaaggctcaagattgtgaaggagtttaacagttcacaagatgtgaacatttgtcttgtctccacaatggctggtggactaggtctcaattttgttggtgccaacgttgttatattatttgatccaacttggaatccagccaacgatcttcaagctgttgacagagcgtataggattggacagtgtagagacgttaaagtgcttaggctaatatccttgggcacagtggaggagatcatgtacttacgacaagtctacaagcagcaacttcactgtgtggtggttggaagtgaaaatgccaagcgatactttgaagcagtacaaggatcaaaagaacatcgaggagagctctttggtgtccacaacctcttcaaactaaggtcccaagggtcatgtcttacgagagacatcctggaggtgtgaagttgttctgtgacctcttcaataatgttttaagtacagtttaacagtatcactcagggattttgaaatacaattggcgtttccttttcagagaaatttttggtattccttctcaaaaatacatgtttagaatttctacatttaaagaagtgggaaatgaattttacctcaaagccaaaacttactcatggatacttatagataatacacatgcattatgagtccaatctgcatgtgagataatatgacctccgtgggcattttcagacagacagagttgagagggatttattagtttgaaaacagctgttgaaattgagaatttaaaaaaaaattaagattttttttcctaaataaacaaaactgtaaaatatgttttgattagaagttacaaaataccccctgagatgtactctcatgtctctgagag

SEQ ID NO: 289 - protein, 700 aa, Mus musculus
MPGSRPTCRALLAAESGGAAGCLPLARWTSPPRSPAQTPAKLCEASIKSITVDGNGKPFAVVLYPDFQEKTIPLQRLQEVKSTKDYSRSLIFDDEDLEKPYFPDRKIPSLASAFQLSEDGDSIPYTINRYLRDYQREGAQFLYRHYIEGRGCILGDDMGLGKTIQVISFLAAVLHKKGTREDIENNMPEFLLKSMKKKPPSTAKKMFLIVAPLSVLYNWKDELDTWGYFRVTVLHGSKKDNELLRLKQRKCEIALTTYETLRLCLEELNSLEWSAIIVDEAHRIKNPKARVTEVMKAVKCKVRIGLTGTVLQNNMKELWCVMDWAVPGLLGSRIHFKKQFSDPVEHGQRHTATKRELATGRKAMHRLAKKMSGWFLRRTKTLIKGQLPKKEDRMVYCSLTDFQKAVYQTVLETEDVILTSSQPCTCGSGQKRRKCCYKTNSRGDTVRTLCLSYLTVLQKIANHVLQAASTSKHQETVIKRICDRVFSRFPDFVQKSKDAAFETLSDPKYSGKMKVLQQLLNHFRKQRDKVLLFSFSTKLLDVLQQYCMASGLDYRRLDGSTKSEERLKIVKEFNSSQDVNICLVSTMAGGLQFVGANVVILFDPTWNPANDLQAVDRAYRIGQCRDVKVLRLISLGTVEEIMYLRQVYKQQLHCVVVGSENAKRYFEAVQGSKEHRGELFGVHNLFKLRSQGSCLTRDIV

SEQ ID NO: 290 - DNA, 5498 bp, Mus musculus
ctggtcgctgaggtgacgccgccgcgtcaggccccacatagcgccccccgctccgggcgggcgatgcccggcagccggcccacgtgccgtgctctcctcgccgccgagagcggcggggctgccgggtgcctgcccctagcccgatggacatctccgccccgcagtcccgcgcagactcccgcaaagctttgtgaagcaagcataaaatctattactgtggatggaaatgggaaaccttttgcagttgtcctgtatccagactttcaagaaaagacaatacctcttcaaagacttcaagaagtaaaatcaactaaagattactccagaagtcttatatttgatgatgaagatttagaaaaaccttatttcccagatcgaaaaattccatctttggctagtgcttttcaattatctgaagatggagactcaattccttatactattaataggtacttgcgagattaccaaagggagggggctcagttcctctacagacactacatagaggggagagggtgtattcttggtgatgacatgggacttggaaaaacaatacaggttatttcatttctggctgcagttttgcataaaaagggaactcgtgaagatattgaaaataacatgccagagtttttactaaaaagtatgaaaaagaagccgccttctacagctaaaaagatgttcttaatagttgctcctctttctgtcctctacaactggaaggatgaattggatacctggggatatttcagagttactgttttacacggtagcaaaaaagacaatgagctgcttcgtttaaagcagaggaaatgtgaaattgctctgacgacctatgaaacactgcgcttgtgtctggaggagcttaacagtttggaatggtcagctattattgtagatgaagctcatagaatcaagaatccaaaagcccgagttacagaagttatgaaggctgtgaagtgtaaggtccgcattggcctcactggtactgtccttcagaacaacatgaaggagctgtggtgtgtcatggactgggctgtgccaggacttttaggtagcaggattcacttcaagaagcaattttctgacccagtggaacatggccagagacacacagcaacaaaaagagaacttgctactggccgaaaagccatgcacaggcttgcaaaaaagatgtctggctggtttctcaggcgtaccaagactcttatcaagggccagctgcctaagaaagaagaccggatggtgtattgttctttgacagacttccagaaagctgtctaccaaacagtgttagaaacagaagatgtggctctgatcctcacatcctctcagccttgtacctgtggcagtggccagaagcgcagaaagtgttgttacaagaccaactcacggggtgacacagtgagaaccttgtgccttagttacctgactgtgcttcagaaaatagctaaccatgttgcactgctgcaggctgctagcacctccaaacatcaggaaacagttatcaagaggatatgtgatcgggtattttccagattcccagattttgtgcagaaaagcaaagatgcagcctttgagacactttctgaccctaaatatagtgggaaaatgaaggtcctccagcagcttttgaatcattttaggaaacaaagagataaggttcttctcttttccttttccaccaagctgctggatgtgctgcagcagtactgtatggcctcgggcctcgattaccggcgactcgatggaagcacaaagtccgaggaaaggctcaagattgtgaaggagtttaacagttcacaagatgtgaacatttgtcttgtctccacaatggctggtggactaggtctcaattttgttggtgccaacgttgttatattatttgatccaacttggaatccagccaacgatcttcaagctgttgacagagcgtataggattggacagtgtagagacgttaaagtgcttaggctaatatccttgggcacagtggaggagatcatgtacttacgacaagtctacaagcagcaacttcactgtgtggtggttggaagtgaaaatgccaagcgatactttgaagcagtacaaggatcaaaagaacatcgaggagagctctttggtgtccacaacctcttcaaactaaggtcccaagggtcatgtcttacgagagacatcctggagagggaaggccaagtggaagctggcatcatgacagccacaacatggttgaaaggggaaccttcagcacaagaactagaaacacctagagaccctgactgtcaagaacccacagatgtttgtgagctctacagcgacatcagtgatgaggagtcggtgggccattccctgggaaagactgataaacacaaattctctgacaccagtagaactccaggcttcccagcacagctcactttgctacaatgtggattctctaagttgtttgaggcaaagtataagtcagaccaggatggcgatggcaaccctgtccccagtgacggaagttctgatgagcagcccatgtgtctttctgcagaagccagacaggctgctcgtcaaaagacttgggactctgtttgtacttcagaacatcagaaatcagataacatccaaactccagatgaaaaatgtgtttctgataaaagtgaaaagactttagaacagaatgtttcttctgaatctgatgatgagacaaaggatcactgtacagctggacatcattgcatgggacagggtgacacagagtcagaagacagtgatgtcatctttcccacacagtatcccactcagagaatccctaagaaccatatacgctttaagctgctgttaggtgaatctgaagattctgaagcagaaaaccctgtgaaagtaaatcatggtgatgacagacagaacagtggcagagggaatggaccagttccaaatctcttgtgtctcgagaacatgacctcaaaatctgttaggaaaagaaaaggtacagatgatattagcgatgagtctgatgacattgacatgttccccaagtcaagaataagaaagcaaagagccactacttccttgaaatttaagagaaaaaaggaaaacaaaaggaaacttgataattctcctgtaacagcaaaggaagcaaatcaagtgtgtgcagctgatggagaccgtagctctcaggttattgaggatttttcatcctcagatgacaatttatctctcagccacttgagtttcactaaactaagtcacagagcagaaactgtaaaagataaaatcagcttgtcccccaagctgcctggcccagataagaaaaataacacttttatatcaagaaaaccaccaagctttctaaatgaaggagttatcagtcaagagcaaatatgcaactcaatggataaaatattagatggtgttcaggaagtggcttatatccactcaaatcagaatgtgatcggctcaagcagagctgagaaccacatgagccgatgggcaacgcgtgatgtgtttgagttgaagcagttttcccagctccctgctaatgtagctgtttgcagttctaagacatacaaaactcaggtgaaggcaaacatagtgtcacctacagagaaagatcaaccaccaagtgatggaggcatttcctctcctctgtacgtatcccaccctgtagtccagaaaaagaaagatgtatatcgtactaaccatactaccttcatcattggagaaacaccaagaggaatccgcagaaagcagtttgaagaaatggcctcttactataagctgcctgtaaaggagtttgctgaacaagttactagggccacatctgaagagcgacagaaaatgctcagagacttctacagtcttcagcacccagaggtaaaggagttctttgtgaattctgcttcagaattgataaaatctgtccacaagaaagaagagagggtgaggaataaatctaaagaaaaagaatctcttttaaaagaaaacccctcaaatgatagtactttatcatgttatgattccaccaacaaaatgtctcaagtttacaacagaaaaatatgtgaaggaaaatcagtcagatctcagaatcatgttttccatagagaagacacattttctagtgatgcagagattaacaaatcacctgtcagctttactgaagagcttcacagtgagagaaaggaccacacacccaaggataccacaacagtcttctgtccaaacagcaactctgaagccctggaggcagagctaggaaattccccaggacgtcagtgggacctcacaggagcatgcggttcaagaaacagaccacttttcaagttgagaaacaaaagggtagaaaacccagggtcagaaaacactcctgaggatggcttacttggtgacacctctattcttaacgacctctttaaaagccacggggaaggtcccacacagctgccaaagaatgttctttcaggacctgtggcaaaagcaaagcagaaaccaaaagatttctgggacatcttgaatgagcagaatgatgacagtctcagcaaactcactgacttggcagtgatagagacgctgtgtaccaaagcacccagtacctcagcctccaaaaggaaagatgagctggaagcttccctttggaaagcaaatgagaagtttttgtggaagacattaagctcagatgttgacgatgaaagcataagcaatacagagagagagtaggacatggacgtgccattaacctagatattgatgagctgctggccctggctatggatgttcatgtatggggcacactgaacatttgtttacaaacttgtgtattaaattattgctttagtataatctaaacagcctagcatgttatcatgggttctttccctaatatctgttttaatcattaacgctcatgtatgtagtttatgtagtactggaggtcaagcccaggactttatgcaagcactctgggcaactgagctacatctcctgccccagatttggtcttcagaacaaatgtaattgtatcatattgtaacgtgtcataatataactattattaactggcatcttccctcctgtgtgagtccgtggccttacgtgagtgacttgcccattcattatctgaaagataaccgacacacagccttccacttttaaactccagaatgccccaaagtcaagtggcagccactgccctctcctcattggcattgggaacttactgttttccttcttccttggaattatgttctattactattaaattattttagataaaagttataatgaagactcaacaattaggactcaatgtatggcattatgttaaaaatgctaatttttataatcactcagagtttgtgtgctgtggtctaaagaaatgggatttttatctttgcccaggattccgatgccttaacttttcacattactatgatttagtaaatataaatagatttatagcctaactttgtatttcttaagtaaaaggaaatgaataaacatttgattttaat

SEQ ID NO: 291 - protein, 1534 aa, Mus musculus
MPGSRPTCRALLAAESGGAAGCLPLARWTSPPRSPAQTPAKLCEASIKSITVDGNGKPFAVVLYPDFQEKTIPLQRLQEVKSTKDYSRSLIFDDEDLEKPYFPDRKIPSLASAFQLSEDGDSIPYTINRYLRDYQREGAQFLYRHYIEGRGCILGDDMGLGKTIQVISFLAAVLHKKGTREDIENNMPEFLLKSMKKKPPSTAKKMFLIVAPLSVLYNWKDELDTWGYFRVTVLHGSKKDNELLRLKQRKCEIALTTYETLRLCLEELNSLEWSAIIVDEAHRIKNPKARVTEVMKAVKCKVRIGLTGTVLQNNMKELWCVMDWAVPGLLGSRIHFKKQFSDPVEHGQRHTATKRELATGRKAMHRLAKKMSGWFLRRTKTLIKGQLPKKEDRMVYCSLTDFQKAVYQTVLETEDVILTSSQPCTCGSGQKRRKCCYKTNSRGDTVRTLCLSYLTVLQKIANHVLQAASTSKHQETVIKRICDRVFSRFPDFVQKSKDAAFETLSDPKYSGKMKVLQQLLNHFRKQRDKVLLFSFSTKLLDVLQQYCMASGLDYRRLDGSTKSEERLKIVKEFNSSQDVNICLVSTMAGGLQFVGANVVILFDPTWNPANDLQAVDRAYRIGQCRDVKVLRLISLGTVEEIMYLRQVYKQQLHCVVVGSENAKRYFEAVQGSKEHRGELFGVHNLFKLRSQGSCLTRDIREGQVEAGIMTATTWLKGEPSAQELETPRDPDCQEPTDVCEKDISDEESVGHSLGKTDKHKFSDTSRTPGFPAQLTLLQCGFSKLFEAKYKSDQDGDGNPVPSDGSSDEQPMCLSAEARQAARQKTWDSVCTSEHQKSDNIQTPDEKCVSDKSEKTLEQNVSSESDDETKDHCTAGHHCMGQGDTESEDSDVIFPTQYPTQRIPKNHIRFKLLLGESEDSEAENPVKVNHGDDRQNSGRGNGPVPNLLCLENMTSKSVRKRKGTDDISDESDDIDMFPKSRIRKQRATTSLKFKRKKENKRKLDNSPVTAKEANQVCAADGDRSSQVIEDFSSSDDNLSLSHLSFTKLSHRAETVKDKISLSPKLPGPDKKNNTFISRKPPSFLNEGVISQEQICNSMDKILDGVQEVAYIHSNQNVIGSSRAENHMSRWATRDVFELKQFSQLPANVAVCSSKTYKTQVKANIVSPTEKDQPPSDGGISSPLYVSHPVVQKKKDVYRTNHTTFIIGETPRGIRRKQFEEMASYYKLPVKEFAEQVTRATSEERQKMLRDFYSLQHPEVKEFFVNSASELIKSVHKKEERVRNKSKEKESLLKENPSNDSTLSCYDSTNKMSQVYNRKICEGKSVRSQNHVFHREDTFSSDAEINKSPVSFTEELHSKDHTPKDTTTVFCPNSNSEALEAELGNSPGRQWDLTGACGSRNRPLFKLRNKRVENPGSENTPEDGLLGDTSILNDLFKSHGEGPTQLPKNVLSGPVAKAKQKPKDFWDILNEQNDDSLSKLTDLAVIETLCTKAPSTSASKRKDELEASLWKANEKFLWKTLSSDVDDESISNTERE

SEQ ID NO: 292 - DNA, 111014 bp, Homo sapiens
tgcttagtggaattattattttctaatgatatttgaccatgtgtgaacttcccccatcatctccttttcttaactatcatctaaaaatacagtacaaatgtccacctttaacaggcatgtaaattttcaaggtgccatagacttaggaactgacatagtctttctttaagaaaagtaatacggccagcgcggtggctcatgcctgtaatcccagcactttgggaggctgaggtgggggggatcacaaggtcaggagatcgagaccatcctggctaacacggtgaaaccccgtctctactaaaaatacaaaaaattagccaggcgtggtggtgggtgcctgtaatcccagctactcgggaggccgaggcaggagaatcgcttgaacccggaaggcagagcttgcagtgaggcgagatcgcgcctgtgcaattgcactccagacagagcaagactccgtctcaaaaaaaaaaaaaaaagaaagaaaagtattaaaaaggatgacagaaaaagaaaagagatcctctcctggttgtgaatatcaaaagcccaaggacaattcacagccatacaaggccttattgtgacaacactagtaaatgcataaaaactttaagaaaatgttttcgacagtgaaattattgcaggcttttagatattgagaacctatctgtgaaactgaactatataaataattaatagtaagaaaaataaagctcatgtttttctacagaaattgaatgaattatagaaatttgagaaggtgttaacagtcttgaaaatatgaattctttgggttttgcatttccaatgtgcaaaagtggtgtgagatatttcaaccagtctgtcaaataatctgtgcataaattggagagagcagttcccctgaaagagttgctttatattaaaaaaaatagtatccagtttaaaaataaactcacttaccttttacatgctttttatgtttccctgtcttaattaattcctcaagttaatttctttttaaccaaacactgtcaattcccagatcatgccattgcattccaatttagggcaacgtgataaaaatgatccttataaatgaagtataagattatatttgcattcagaatcactattcaagtctgcatatcttgtaatggccatagaattctctttacccgtgtttcatggtacctaagctgtcaattactttgggaacacttttgaaaagtaaaactttggcaatcatctttacaaagtatatagacatggtttaaaatttgaacctaaaatatttaaaccatgtctatgtagcttctcttttgaaaaagtctgccttgcttgaagaatttaagcaatcaaaattcaattcaaggaaagttgccaaagatgaggtgatgcattctaaaataactgagataaaagttatcttcagcagaaatcatatagaattttagagttgaaatggagcctataggtcatgtaatctgaagaccactagtggagtccatggtaagaatagaaaaaatttttcaccctatgatttcaccatgattcaaatatgtaatgtttccatgaagatttacacaatattgtaaatctacattttgggagggattatcttgatgtccttcaaatgtaattcatattactttagaatctttatggggtggaggaggtcaattctattatgaatatgtaattgatttttgcagcttattcattggaaaaatacaattttgtatttttctagatgggaaaaagtctttctgtggaacttatatcagccagctctctatgctacaacatttttggatatgtatgagggaagaatgataaggattaagtccgagtattatgtcaatattttatgtgaaatcttattcaatttataatttaactttcaataattagttttagcattttaaattttattgtaattaagtctgcatttgttgtatttattaaagcaatattaatctattgatttacatttacattttaaacaacctacctttgtttatttaaggctaacaaagctgagtagcatgttcttatatggacatgctagtgttttatgctgattatttttataagaagttaatcatatatgacataaatctcatgtttcatgtttatattttttgcatttgtcattaaattaaaatcttacattaaaaaacaaaagaatgccaaaaggaatgctctgaacataaccatatatgcatcattgacatgcaaattttgacatgtaaacaatataatacaatcctattcatttaaagagttagaataaaagcatgtctaggaaggcagctgctttgtaagtagtcctatgagtggtataattataccacttctttcatcattctagtactttgccactcatttgatatttgacaactgtgctgggatgactggaaaatttggatgtgtaaaaataacttgttggattggtttttacattttttctaattttaaagttttctaaaagttttgcattttacattttgtttttaatttacctggaatttaactttgtgtataggataagaagttcaaccctatttccctcctctgtgggaagttccatcaccatttattcctctgttccttttttatgttttatcaaaattgctttgatcattcttggcactttacgccttcatataaattttacaatcctcttgtcaaggtccaggggaaaaaaacctgccagtaatctggcaaggaattgcactatgaataattttggaaaaattgacatctattttttttataccatgaacatggtatatctctcctttatgtaggtttacaatatggttttattattgcttctataagcaacttgcacacatttttagataattattagctattcttacatattattggttgctactgtaaaaatacattttaaaaattatattttctaacttgtgtagctagtgtatagaaatacagttgatttttataaattgcacttgtatcctcaaaccatattgaattctcttattctaaagatttacttgcatattctcttgctttttaggtgaataataatattgtttgtgaatagtagcagttttggtcttccttctcaatatctataatttatatatagtatcttttattattgaaatggttaagatcaatgatgagtagaagtagtgataacagatatcattgtgtttatggttttaaaaagacagtgtctaacatttcatcattaactatcatgcttgctgcaggtttcgaatagatactctttattaagttaagaaattttcctttattgcttttttgctaatatttggttggattttagaaaatttttcgatctgttgagatgacataatttttcttctttatttcttagtgtggtaaatttcactactagattttccagttttaaactatatttgcattcttgaggtaaacccaacttggtcatgatgcattattattattattattattattattattattcttgctagtattattcaaaattagattcagttgtccagtattttgtttagaacttttgcatataactgtaagtaaaatttgcttataatttcacttgtcatggtgtccttattaaattttgctatcaagatttaaccaagtttataaaataagttggggagtgttccttttcttgtattctctggaagagtttatgtgatatttatctattccctttgacatttggcagaactttcctgtacagtcacttacatctggtcttttcttggagggacattatcaactactgattcaagcttctccaacggttatggatttcttcagtgcttcttttcctttttgatttttttttttttttttgagatggagtctctctctgtcgccaaggctggagtccagtggggccatctccgctcgctgcaacctctgcctcatgggttcaagcaattctcctgcctcagcctcctgagcagctgggactataagcgtgtgccaccacgcccagctaattttttgtatttttagtagagacgggttttccctgtgttagccaggatggtcttgatctcttgaccttgtgattcacccacctcagccttccaaagtgctgggattataggcatgagccagtgtccggctccttttttatatatttttaaaggcaatatagatttgaacacttgggcatgaaatcgtttttagtatactcccatatttttctgatctttgaattctctttagcattgccctattttccattcctaatgtttatttgagtcttttctctatttttcttgattcatctcaccagtggtttgcctacttcattaatcttttcaaagaatcaacttttggcttcgttgataatttctattgtattttttaaaattactctttaacttctgtttattttttccttttattctagtttctttaggattagcttgttgtccttttttaaagttggaagcacaattaattttcagcttttcttctttttcaatatgagcattttttacactttagcaatttcccacaaactttgatatgcagtatgattattcagttctaatggatgttgaaacaccaggactcaggggatgaaatatgaatataagttcatttattggaacaatactcattcaaacccactttgagaaccatttttttcttcatattcttgaaaggcaactaggaaaagtctcatgattcttctagtctctcttgataataaaaaaatcctggggtcacttctagccactaaaaagagacaaacaaaaagtcagtttggtaaagtccatgtaataaaaaaaattaagacttcaacacttgtttaaccttaaagacttcccctttcagagctcacacttggtacaggcaagtggttggcaggggaaaatgtgggggtgattgcttcttttatatgatttatgcctcaccttcctctcctactttctaagctgcttccaacttctttagggatgattcggaaaaagagacaaaaacaaggaacaagggccaggccaggatgtgcatgcttctttctagcaacctagatacagttaaccaggcactacattatgctattatcttggcttggagtttcttaggtaacgcagattgtatacattcaaatcctaaatttgagggcatagctgtggtttcaaaatttcagagggaattaagaataccccttcaaaaatcccatgccaaggcagacaaatccctcttcatcctccttcttttctgctatccagacttttttcttctagctcaccatttcactaaggatgttacctttcaagctttctgatttcaaatgggaggctcagtttcaatgtgggaacttgtgggagcttaagaccatgtcttctgctcccacaagcctgtgaaaattcagacctttttgtaactgagccagacaaatgtgtccaggaaaggagtggtataagtgccatcttaataactagttttcagttccttccttatttttgatctatgagtatttcacgtacttcttgaaagctcagctatgcattgagatttttttatttttaaaattttatagattcagagggtacagtacaggtttgttacatgggtatattgcataatggtgaggtttgcacttctagtgtacctgtcactcagagtgaaagttgttcccaacagataatttttcaaccctcacctctctcccatcctacccacttttggagtcctctgtgtctattatttccttctgcatgtccatatgtatctattagttagcgcccacttttaagtgaaaacacgtggtatttgattttctgtttctgagtcatttcacttaggataatggcctccagctccatccatgttgctgcaaaagacctgattgtattctttttttttttatggctgcaatatattccatggtgtttatataccacattttctttatccagtcatctcttgatagacacttagatcgattccatgacgttgttattgtgaactttactgtggtaacatacaagtgtgggtgtcttttcaatataatgatttattttcctttgggtactcagtagtgggattcgtgcatcaaatggtaattctacttttagttctttgagaaatctccatactgttttccatagaggttgtactaatttacattcccatcaacagtgtataagcattcgcttttatattttgagagtttttataaacatgtttcaaccagtatttcttggtgttttgttgcaggatttttatacttatctgacatgaggtattaaatgttctattatttgagtctatttattgagtctatgaagtaaaaatggtgttggtgaatattcaaggtgtaatgatattcattatatgggaccatgatatacttctaacactgactctatatatctttcactatacctcattcaagcctcaaattttcctttctttggccggagcttttttgttgtgttttgctttttaaattgtgataagaaagaacatattatataaaatgtaccttcttaaccatttttaagtgtacggtttaatagtgttaagtatgttcacactgttgtgcaacgttgagttttaaactttaagatttaggttatttgtggcaaggaaggacaggtctattttatcttctttctcttgccttcactcatctttgcttccttattggctggaacgacgtatgaagggagaaatgctgcaacctaaaatcatctaactaaaactcaaaagacttaatttcttgtgttgtcttagagtttcatatctatttttttctggagcctttttgctagattaactcacaattctggagatctgtcaaccacatacagatatatatttgacttttgcagtgtgaagataaagagagactattttttggcaaattattggtgggtttaatcatccttccatgagcctgttttgaaatgcctgtgttatcaccatctgtgttatttttttctcttttgtagttttaattggcttaatttttgctagatcctcctttgccaaaagttttgtatgtgattcagttcattcatgtgatttatccaacatcacacatattaactacaggaattccttaatattttacaagatattcagtttaactttgaagtgactggtctgacagcgttagatgttcacaatatcagcacctagacaaggatgtcaatgcaaagacaaaagctactgggggaaggaatatttgagaatgtctaactttatgaggcaactagttcactaggacatattttcatgtcatgattatttctgcttcagtatacactgtaagtacagcagtgaggttaaataataaacactcagaaaatgagggccgggcgcggtggctcacgcctgtaatcccagcactttgggaggccgaggcgggcggatcacgaggtcaggagatcgagaccatcccggctaaaacggtgaaaccccgtctctactaaaaatacaaaaaattagccgggcgtagtggcgggcgcctgtagtcccagctacttgggaggctgaggcaggagaatggcgtgaacccgggaggcggagcttgcagtgagccgagatcccgccactgcactccagcctgggcgacagagcgagactccgtctcaaaaaaaaaaaaaaaaaaaagaaaatgaggtatcctcctcttttgttagtcacaagggtattccttcaaccagatgatacctcccatttaaatcaaaatttatttctgaatttgcttatcacttctattaagaggtctgctctgtcaagagctacatcttaactcaatggacctctggaaaaataagacaaaattacacaactagtcatttcagagaggggaaaaaaatcaaacttcttccctggtagttgtaggggaaaaaaagaagcttgattaaaatttcaatttgccattttgattttagagacaatgtgaaaagagatataatccatcaataacaagcagcagatttttctagattttaagatttccaatatcagggtgcatgtcagaatcaagaattacaattataattagtagtgtttttcgctgtgtcgccagattagagtgcggtggcgcaaactcggctcactgcaacctctatagacctcccgggttcaagcgattctcctgcctcagcctcctgagtagctgggactacaggcatgtgccactacgcccagctaatttttgtatttttattagagacggggtttcaccatattggccaggatggtcttgatctcttgacctcatgatccgctcaccttggcctcccagagtgctgggattacaggcatgagccaaccgcgcccggcctattagccaaaatattaaactgacataatggctatgtagaatgcaactttcaagtggatgcattccattgataataatagtaataacaacacatatattccttactatgaccagctactgttttaggagttttacttaattatctaattttttacaattaccatttttaggtagtttactattattagcttcactgtaatggtgataggtgagtacaataaaacacggagaagtgatctggccaacaactcacacatagatggctgagttagatgtttcacttaggcttaaagttattgcctgctggtaagcaaacaagtcatattttaaatgaagcattttatgaacacatactactagtttttagtatctgccatagaattgagatctatttgcaaacagccatattgttttcttaagacactactgtaggcagaataatgatcccccaaagatgtttatctcctaatttccggaattcgtgaatatattagcttacatggcaaaaggattctgctgatgtgatcaagggcagagacctggaaatgggaagatgatcctggattactcaggtgagccctcagaatcttttccagctgcaatcagcggtagacttgaggatggaaggttcagagagatggcatatcactggctttgaagatggaggaagggaccaaagccaaggaatgtggacagaagctggcaaaggcaagctaaggattgtcctgtggagtcaccagaaaggagtgcagcccgggtgacacccaggtagcacttctgatctacagaaccgtgagataataaatgcattgtctgtcagatgataaatttgtgctgtttcaagctacaaagtttgtggtttttggttattgtggcaatagggaacggatacaggccctgtcaggtatttcactcaatccatgaaataccttacagtatacaaattttaacatgcgcgggagccacttacggatccgtctatctgtgctgcctgggagtgtcaagaggccgtgtccttcattcacctcgcgcgtgggcggcgctgccctgaagatgctcccgggctcagtgcagacggctcagcgttctctcgcgttcaacgaaccgccagaaacgtcagatggtacggaggaaaacactttacactttaacagtatttttacgtttatttgcagcaaatgttgttggctttgtatttaaagtatttatgactcactataaagtgtaggatccaagaaaacgcgctagtttcacttggcccccgtggctgtcccggggagctctccaaggaaggactggttcctgaagttcctggggtgctgcaccaccacggaagaaccaagctccacagagaagccagaagccgcgaccgcggggacgctctctgccaggcctccaccgcctcagcggccctttacagccaccgcattctccatgcccccagttatttctagcttcgcacagcgcccggcccaccgagcgacctcaaacctcgcgacactcgcaactcccgaggcccttcctgctactggcctcagagggaagagacatcgggaagattgctccgcccacagaaaggaagatttcgttctcgcgagatcccaatgacaattcgggagcccgttctcgcgggattttccaagaccgggttggaatttgcgggggttaggagacggaagtcagagcctaggaagatttgggggtcgccttgccggcctcctgtcctcctccggcggcggcggagcccgagagaactaggtgaacaccgctttgccagcctcacacagcgtcccctggctctgccgccgctccggacgtcgccctcccgttctgcttgggtccccttagtcgctacctttgctgggatccccctcctccatcctgtggcttcgggttgccgaagagcgatgctcggagggcggccggaagtggcgttggccgccattggcctgccggccagccaccttgctgtcctccgccgccttccgggtgttacgtgcagccgggctcggcccctccccctggccggatggatccgtcggcgccacagccccgcgcggaaacctcaggcaaaggtaccagctccgcgctcgccccttacgcagaggcctgtgtactgcgtcgcgttggaccagttcttgccggtgcccttcgggttggggttttgccctgtagatcctcttcagtgacagctgcagattgtgaacccctccaggcctggaaccaaatctccgattcagtgttgagaacctggactcgggagtcagcccctgggatctagtgctgcctctgacagttacttgctgagcaactttgggcaggctcctcatctgtaaaactgggttcattactaggttcttgcgattattaaatgacgtggggaatacgcaaagtatttatgtgaccccgcgtgtggcccatattaagcactcagtaaatgttattttcattctttattcttgtatgccccagttgttagtgaatggcagaagtttgttgtaagtagataaatgaaggttgagatatttagttcagttgagttttattgccgattgagtcagggcattatattctgccttaaataggaggtttaaagaaggtgtgattatctaccacaagtcacctgggatgccttctggcacccaaatgagtagttttcattaataattgtgctgtataacaaaagctaccaggtattgagtgattttcctgagcccagcaatatgctgattgtttacttgctttcctttgaggaagatatcgatctcattaaatagatgaattcagagctaaagttcagagagggcaagttacaagcctgaattctgaggtctaggaattgatgacgctgtaattcagggaccaaacatataaatacctataggagactggcagctaaaaatagatgaagctgccgagtggatattgtgactgggaggctcattccttttgataaatctagtcactcttggtatttagggaaattggtggaaggagcagaaagctccagggccccgaggtgggaacacccttgaggaatgcttgaggaggcctttggagtgaaagagggagagagagaccctatcaccagaatgagttgagttggtaattagtttaaaccaaaacaaatgatttcgactcattaaattttaggagacttaacccatttccctgttaaatccaacaggaaatcttaacaatttaagcagttgttctgtagtttggatactgagagattccatttctaactcaactgaatttatttcgtcctagaaattatccgaactcaaacccaaaatactccaataagttgtgtgattcccttaaggcttttttttttttgcacatgctgtacacttatctgagatacagttcttagacccctttcccttttaaattacatttctcaatactcccttctcatagcactcttcttccaatgcagtttttacagttatgtatatgttggtgtactttttagttttctcgcaagatatcaaggatttgtgagattgataatttgtaataggccaggcgcatggctcacacctgtaatcccagtactttggggaagcttaggcgggaggatagtttgaggccagcctggacaacataagcgagaccctgtctctactaaaaataaaaaatttagccaggcatggtggtgcacacctgtagtcccagctactcaggaggctgaggcgggaggatggctgagctcaggagttggagtttacagtgagctataattgtgccatgacactccagactgggcgacagagacactcttgtctaaaaaaaaaaagaaaaaaaaaagaatgtgtaataaattcgcatgttcactgaatgtctgctgtgtgactctgtgttggtcctggggataaaatttataacagtacaaacttttcttggaaaggaaattactctctactggaaggaaaagacaaaaaacaagtggacatgataattaaatgttatgataagtgctacagaggcaataaaatgatgagatagagaataatgggtaccctacgctaaataggtggactgggagcagagagactggttaggcataatttagggaaagttgatggtggcatgctttaagacagaggtctgcaaactactgcctgtgggctaaaactggtctgacacttttttttgtaaataaagttttattggaacacaactgtgcccatttgtttatgtattgtctggttgcttttgcattacaagggcaagagactgtatggcctacaaaatctaaagtaacaaatagctaataactgactctagagaaaatgtttgccagcctttgctttagagagatagtggcatggaggaaagtgattcatttttgaagtagaaccaggatattccgatggattggatgtaaggagtaatattaaatgaggtttaagggctgactaatggttttctaccttgaaaagttggttagatgatgatgccagttttttgtttttttttaaatgccagcttttttttttattatactttaagttttagggtacgtgtgcacaatgtgcaggttagttacatatgtatacatgtgccatgctggtgtgctgcacccattaacttgtcatttagcattaggtatatctcctaaagctatccctccccccttccccccaccccacaacagtccccagagtgtgatgttccccttcctgtgtccatgtgttctcattgttcaattcccacctatgagtgagaatctgcggtgtttggttttttgttcttgcgatagtttactgagaatgatgatttccagtttcatccatgtccctacaaaggacatgaactcatcattttttatggctgcatagtattccatggtgtatatgtgccacgttttcttaatccagtctatcattgttggacatttgggttggttccaagtctgctattgtgaatagtgccgcaataaacatacgtgtgcatgtgtctttatagcagcatgatttatagtcctttgggtatatacccagtaatgggatggctgggtcaaatggtatttctagttctagatccctgaggaattgccacactgacttccacaatggttgaactagtttacagtcccaccaacagtgtaaaagtgttcctatttctccacatcctctccagcacctgttgtttcctgactttttaatgatcgccattctaactggtgtgagatggtatctcattgtggctttgatttgcatttctctgagatgatgccagttaataagatgcaggaagactattagtcaccatcatttttgacattagttttcttcattttatacccattgtgtggtataatatttggtgaataatttgtgcttaaatcacatatgttgaataatagataataaaataagtcttaagaaatgatagggtaggcaaacacataatgggaaatataagtaatgtgttaagaattgctgtaagggttgctttaggttttaaggtgcaaatagtactgttatgaaaattgggcccattgacctatatgttgttctacttgtacagtggatcgaggctttagtttgacattaaaacactcttttagaatggtgtaacagttgtcaacagtttgggtccagagagtagagtgggagagaaggtttttccctctgtactcattattgttatggtaaaataacctcatcaaagttagtggctttacttttaaggaacaactgatggatgaggaatttaatgagctattcttgctttagatagtataaacatgtcatgttgtagttataaatatctaactggaggtcatcaggaagaccctaggaaactgccagtggttatctgatctcagtgagaaatgtataggaaaaataattcctagtgttcttatgtttgtagccatagaattatttttggattcttgccataagaaattccatttggaaaattatttttacttagttttctttatttgatactttttaattgtaccaatagtatactgtggactccctcctcattcatagtggtatattttctgggaaaataaaatagctgtatggttagtcacagaataagttcataaagagagaggtaatactctttaaagtgtaataggatctttgcagaaagagatcttagaattcatctcttaaagtaaatattcaaaacccggaagaggaaaagctgtgacatcactgtagttgaattggaggttcccatggttagctgtatacaagcagtggttaaagtaaaggcttagaggcaacaatattgcagtgaaaagaaacagctgtttctagagaaaggcaatggaataactgtaaaaaagacagatgaaccacaaagcattgctgtccagaggattttagtttactcattaccaagtcctattcacgattactctaccatatcatgaaatatatgtatatatatatgttcatgagtcaggaagaatattttagtcagtggctctcaaccctggctgtgcgtcagaatgatcttttgaattcaacaataacaaccaaacaaaacaataaaaccagatgcccgtgacccctatccactgaataagaatcactagaggtggtgtctaagaatgtatatttttaaactccaggggagatgatgacacacagttagggtaagaaccactggaaataaagtatgtaccctttattctgtttattataggagaatatctgaaaatctattttagaaaaatatctatacatgttagaatttatcttgttccagttttttggaaaaggcatttatgtgaggtatatattgtttctcacagctgtgaataaatgaggtgttactttataagctagctttggaaactttattttctttattcttgcagacatatggcatccaggagaaagatgtcttgccccttctccagataatggaaaactttgtgaagcaagcataaaatctatcacagtggatgaaaatggcaagtcatttgcagtcgtcttatatgcagattttcaagaaaggaaaatacctcttaaacagcttcaagaagtgaaatttgttaaagattgccctaggaatcttatatttgatgatgaagatttagaaaaaccttatttcccaaaccgaaaatttccatcatcttctgttgcttttaaattatctgacaatggagactctattccttataccatcaataggtatttgagagactaccaaagagaaggaacccggtttctttatggacactacatccatggaggagggtgcattctgggtgatgacatgggacttggaaaaacagtacaggtatttaattatgttataacagtaaagtcactttactgtgtacatgagtggatactatatgtaaatctttatttgtactgctgttacgatagctattttgtgtgttcctgtgtatgtttgtgtttgtctcactaactagatagtgaagtcctcaaagttgaggacaatgtctcagttattttatcattcttcagtacctatgaaatattttattccaaaataatgttttggtaccacttggtttgattttacctttggtaatactggtactaagatatcaatatatttgaagtcatttaactttcttcatacttaatggaaggaaagcattctaacatttgttatgccacatagcatggttaaattgttcctataggccttttgtgcatattgttcgaagtttatcatgttagaagtttcttaatctggaatccctgggtcactagcagttctgtttgtgaacttcagagagacttcaagattccctaaaatgtgtactagaatttgtacacatacatactttcctaaagaggggatttgttgtagttaatctgtttctgtataacaaattatgccaaatttagcagcttaaaacaatattcatgtattgtctcacagtttctgtgggttgggaatccagctgccgcctagcctggtcctctagctttgcctctcacagggctgcagtcatctcaaggtgactggggaagattcacttcctagcccacctgtttgttggcaggattcagttccttgtgggttcttggcctcagtttcttgtgagctgttggctggaggcctcctttgcttccttgacacatggacctcttcatggggcatctcacacaaggtagcttgcttcataaaaggagagcaagtaggagggcaagagacagcactagtaaaacagaagtcatagtctttggtgatgtaataacacaagagacatcccttcacttttgtcacattcttctcattagaagcaagttgctaagtccagccagaactcaagggaaggagattaaacaggactgggaatatgaagaggtgggtattattgggagtcctgtcagaagctgcctgctacagggtctttagctttccttagattttcaaagaggtttgtgatccaagaagaatagagttttgaatctagattttatactaaacgatcactttagattttcaggagtgtgtgcctagtttgtgattaagttattctgcttcctttcttataattgagtttaacttattttcttcttcatattacctccattagttattggaactcaaaggtttaagtggaaaactaaatttaacatttataaatagccaaatttcagacaccaatgatggaataaggaaaaagaaaagaaaaaaaaaatagccaaataatgctactgtgtgtaaaggtctggtgtgaaaaactaggctaaaataaagtcttttaataatcatattaccattaaccatactctatgttccttcaagcctaggcagtgcagatagtttagacatgcacactggacgtgctaaatgattgtttgtggaataaatgaatttaccttcttcgtttattccacaaactatcatttagcatgccggcctgtaggtggaggatagacagcaagaataaagaaaggagccttcaagaaattacctctgaaactgacccaacagtcccacagacagttttgtttgtttgtttgcttgtttttggataaacatagaaattgacccttctggtcctaaagctttaaacttgtatttgttttatctgagttccttcctcaggaaaggacccccaggcctctcaaaaagtatcaaagaactgaaactcaccagatcgtagaattcagacagtgagacaccaggcctctcattcatcagattacttccttagccctcccaacttcctgttttcccatacattgttacatttcttctctgctgtaaaaactcctaattttaatcagggagatggatttgagactgatccttggctacagtgcctgattaaagcatttttccttggcaatacgtgttgtctcagtgattggctggctgtatggtgagcagcaggtcttagaccgaacccgtggtgtttcagtaacgccatctgtgaccaagattacagatgagtactagaggaaaattaataaattaattaaagccctgctgtaactgttttcgcatatacttctactgtttttgcctgtggtagaatgtttgttaccacaattctttgattagccagtgcatgttcaacttcaaaataaacatgaggctgggtttggtggttcacacctgtaatcccagcactttgggaggccaaggcgggcggatcacgaggtcaagagatcaagaccatcctggccaacatggtgaaaccccatctctacaaaaatacaaaaattagctgggcatggtggcccacgcctgtagtcccagctacttgggaagccaaggcaggagaatctcttgaacctgggaggcagaggttgcagtaagtcgagattgtgccactgcactccagtctggcaacagagtgagactctgtctcacatacaaaaaaagaagaaacatgagggtactacatacaaaaagtgatctgtttgggaaccaccatcctgcagcttaaatacaattcgaattcaaattcttgcgcacattttagtctcaaatttgaaggctgtctttcatctctgaggcccatgttacaaagaaatttactttattttacagttcataggattatttttaaaggagctgattttactgcagaattttctattcctgatacactgtaatcattgaaggacttggagatgttctggtacatgctgttagtgtgctgtgcaagtctttgagggagtaccgtctgaagattaggaaatggtttctgcactaattttgatactcagatggatttgtctgatgcttggggacctagttctctggttactgttgttgtaactcagggaataatttctacatagataggtggtttgaaagacccatttaaggtagagcttctatagatagataaagcttctatagatatgactaagccagttgaagaaatgtgaatgattactgtgttaactaaaatttcagaatgtagtaaaattaattgataatgaaaatagaccattgacatttactgtttgagctatagttttatcttcttttcttcttttttttttttttcctgtttcttgatttcatccctttagtttccccctttttatattctaatttggccatgatatgaaactgaagtctttttaaagcttgttttacataccaaataaagtttccttccctcatttcaaatttaaaagtaggtgaatttaatattttacactctacaggggatgagaattgaaaaatgtccatttgttctagtgacatagaaatcattggtatgctgagcaagagccattttgctggagctttcagacacaagccataatggagtaggtgaagacgtggacatagaaagaacgtatatttacctctttaagaaatatggcttcgaaagggaataaaagtgacctagtagtaggtgaagagagagacgagaatttgagggggtttcttttttgtttgttttgtattgtttgggggtaggaaagacttgagtatttttaaggtgaattggaaggacagatctggtgaagagggcacagataaatatgcaacatacataatgatatgcccacatatacatgtacttctgtaaacacacacacaaacatacatatgcaaaaaatggagtcacataataactactatcttataagcaggttgcagatttttttttgtcaaagattatgaactaatttttcccgataccttctgacatttttctaaaacatagaagagttaaaagaatggtacaatgaaaagccatattctcaccacttagattctgttaatatttcattatacatggttttgtaatatccatccatcttttgttgcattttaaaatagcagacattaatacattttatcccacatacacatatccaagaaaagatcatcacagccaagacgatgaacatgtctatcactcctagatttcctcatgtccattgtgcccttgatatgttcaacaccatgcagttcatcacctactatttttggttttagtgggactgaaaaattaaagatacttgaggaaattttaatacaaaatccaagatttttatgactatctcccaatatttcacagaattttcacatctaattcaacaggtaacttgaaaatgaatcccttttgtacatttacgtgataattagctagtttaagtacaataaacaatttcaactggagtatacaggtttgggaacctgacctttggtaatcagacaactcagtgataggaaaagaggtgagtgggtgcttaccatggagtagtggttctctaaagtggatatttgggtcagcagcattagtgtcacctgggaacttgttaggattgtaaattccggggtctcactgcagacatactgaattgtgaactcggtgggagtaggagaggatggcaatctgtgttttaacagatgcttcaggtaattccaaggcccactaaagtttcagagcctttgctcagacggtgtgtttttcagagggttagaaaactttgattaatctggtgagttcagtgaacattggttaagggatgtttggtctacgtgaatcttttttgttgttgttctctttttgtttttttgagatgggggtctcactctggcattcagggtggagtgcagtagcgagatctcggctcactgcaaagtccacctccggggcccaagcgatcttcccacctcagcctcccaagtagctgggaccatagttgctcaccaccacgcccagctaattttttgtatttttggtagagatggggttttcccgagttgcccaggctggtcttgaactcctgagctcaagtgatctgcctgccttgacctctcaaagtgctgggattacaggcaggaactactgtgcctggcctctgtgttaatatgtatacataggatgatgatcatttcatttaaaaaaaaaatacatttagaaatggaaatgatattagagataattttgttcagctttttaacttagtacgtaaaacaggcacaggaatgacttccctatctagggtcaggcacagaagtaataattttcatttctattctagaactgttatttttttcctcttctatcatctactgccttcttttgacttaataatacagttaattaaaagccttttactcaacttttaaccatttgttcaattggttgacatttgataagtactcactctgggccaggcactgtgattggcactgaagagccaatatgaatataaatgcatataatacctactgtgatggttactagtgagtgtcaacttgattggattgaaggatacaaagtattgatctaggttgtgtctgtgagggtgatgccaaaagagattaatatttgagtcagtgggctgggaaagacagacccatccttaatctggcaggcacagtcttatcagctgccagcgtggctagaagtaagcaggcagaaaaatgtgaagagagagactggcctagcctcccagcctgcatctttctcccatgctggatgcttcctatccttgaacgtcggactcaagttcttcagttttggaacttggactggctctccttgctcttcagcctgcagacatgctattgtggcacttcgtgatcgtgtgagatagtacttaataaactcctcatatatctctattccattagttctgtccctctagagaaccctaatacacctgccttacagagttcacaaaagagtaataaaaggaaatgaggccaagagtcatctagtctggtaagtgggttgggggggagaaacaagcctgcctgggggtgtcaaagaagactccacagggaaattggtgttttcatactttgcttttggaaacccaccaaactttgagttttgaattgagttttaatgaattttattttttactgaaggcatagctctaatatagtatttgaaaggtttatcacaagagaagagctcaaattcattgaatcaaaataatttagtttttaatggtagtgtggtaattagcttttacagacaccaaaatcttaaggactactattaagcagatgcagtaatatgtcttaccatattattttattttctcatctgctatgcaaagaagataatagtactttttgagtagcagagatagaattttgcaaagcatgaagacattctttgaatttttgtttctatattattagatattacattattgaaaatgtcattactgaaggctgtcttattaaaaagatgtatagtaaacctcactcttgagagaaatgggattgctgataattaaaggtttcttaggttattttcagtaccttttttggataataagatcttcagtggattcaaaacatactaaaatatgaaggttcttgggatctcaagtcatgttattcactcaggaatatagtaataaagagaaaaataatattgtctttattttcattcattgagaaaatgctataatatccagtgtggaaggttaattagcccccagatccctgagcccttttaagcagaaacaaaaatgtactagtatttcacagataaaattgtatttcttcttttggcatgtagttctgattttaggggagagctttgtaaagataagtgagctagaccccatttcaaaacagcactttgtggttttttttttttttttcaaagcgagcaaaaatacttttgaagtgtggttctgaaccactctctctgtacctttgtatctcccaggaagttgaaaaataaggtagtaaacatttttttctttttgttctgtaagaaatagacaatttttgctatgccttcctcttctggtctaagggaaggtttatgccctttttcccagcctcagatttactcagtatgtcatgagctgactctgtgaggaaagatgacttataaaactgttggcttgacagagtttagaaaggaatacatgtaaaaacagaaagctttcccagagtgatatttcatttctgaaatgcagtttttggcctttcactattctagaggtgactgatttaaatatttgtttttgttcttttcatctataagcaattttagaactattccacaataaaacatgttctggctttttctttgcagataagttttgtaaaccttcattgtaaatgtgtctttagtcttctgtgaattaatattttgatagacctctactggaccaccatagtgtggtaagatggctagatctccacccaaaatacatatttcctttgccttcttagagtttgggctagctgacagagactgcatttcccaaatctccttgcatgtcagtggagcttgtgactgggttccgccagcagaaataagggtagaagtgatgagtgccatttatagtcctggtccataaaatccacctgtgctgttcttcacattctcccttccctaactgtcttttgtgtattgacactttgctgctagcattaccacaatacctattagtatattttaattaatataattaatatatagctaagagtttgttagtggttttagctagcttctccagtttgtattctcaactaaagtttattactatttcaacttaagtttttcgggggtgggtggataagtagtgttaagaggtagtgtagatgatttaaatgagatacaaagatttttaaaaatcattagtggatttagtgaattaaataaagctaatctatacttagagtttataaatttagctgccacctatgaaatatcttccaaagatctgagattcttaaacacaaggaacatttcacatatctttgttttagagaatttgacaaatgaagttagaattaagatcgtatatcaccttggatagatgagcaaattgaattatgaatttgcacaattaggaatataattttcctataatgaaacaatctgtaggtgagttaagagcaaatcagtggatttgatcttatattacctcatttaaattgttatggtatctaataggtatctctcttgtcttttcagtagcctttgaggaccagttgcctaaaattaaaaagagtatatctgtcaatatatgtgtgtgtgtgtgtgcatgtgtgtatctttaattctttaattaaggtacacttaaactgtaaaatgcacagatctcaggtatactacttaatgagctttgacaaatgtctatgtctgtgtaactaatatactaatcaaaatataggacaattccattaccctaaaaagttttttcatgcccctttccagtcaatatgccaattacctatacttttaattataaattttctgtgatcagtgtaaagttatattccaaaaggtagttagaacccaaaatgttatgcttatttacaccatcaaggaattcagtaaattctaatattaggtgatgtatttttaaatagaaaacataactttaaaaatatttataaaatgaaaattgtgaacatgcatcaaagatcttttacttaggtggtgttaacaatatttaaattgtccaatgcctaaactcagttatttgtggagtatccgttctctttcttttaatttatgttctacatcagccagtttgcgcacattaatctctcactggattctttagtaactgtttattttctgttcatttgtccacttttttctcaaccatgctccttcaacacatctcctaactacctcttccctgtcaccccaaatcagcttgatttcatactactgaatgatagaaatagcctttcatctagactattccagcatctagaaatagcctttcacctagactattccagcatcttggtattgagtaggtaataaatatatttttattgaatgtgttagtgaattttaagttgaattggataacattatggttctatggttataacttatattgcctatatttgccaggctctatgataaacattttccattaaacattcatgttaattagatattcttgcctctatttaattggtgaaaatattaaaatttatagaaagtttatgtaaattgcccagtgtcacatagctagtatgaaactggttggtcagacaccaaagtctttgtgataagtcctgcaaattgacatgcgaattttgttagaatattttaaaacttaggacaagtttaaaccatcctatttttcatctttttataatattttagacaacataatttgcaaaagctactttgtttattatatacaagatcatatgcaagaaacaaagccttctaccttaaggaatgatgccagaaaaatagctaatgtgtttttgttttttgagacagtgtctcgcttttttgcccaggctggaatgcagtggtgcagtgttggctcactgcagccttgacctcctgggctcaagtgatcctccccacctcagcctcccgagtagctgggactacagatgcgcactaccaggcctgggtaatttttgtactttttgtagaggtgggatttcaccatgctgcccaggctggccttaaactcctgagcttgcccgcttctgcctcctaaagtgctgggattaaaaatagctactgtttgcctgtaatcccagcactttgggaggctaaggtgggcagatcaccagtggtcgggagttcaagaccagactgaccaacatggagaaactctgtctctactaaaaatacaaaattagctgggcatggtggcgcatgcctgtaatcccagctaactcaggaggctgaggcaggagaatcacttgcagccgggaggcggaggttgcggtgagtcaagatcgcaccattgcactccagcctgggcaacaagtgtgtccctaactctgtctcaaaaaaaagctcctgtttattgaatcattgatatttactgacttgacactttacgtacatactttttaacttttttctagaataaaaataattctgattacactgtaatacacaaacgcattcttataaaaatgcaagctgtaatttttaaattgaggataagtccacacagcattaattcattatataaaatgattaattgagtgcatttaatgcattcagaatgttgtgcaactcccacctctttctagtttctgggttgtttccacttttagttattatgaataatgcttctgtgaacatttgtatgcaaacatttctcttgtgtgtattcctagaattggaattagtgggttttatggtaattcagtgtttctttttttttttttcgaggaactgcaatactattttccacaatggctaaaacattttacattcctaccaacaattgtccaggtttcctatgcctccgcatcattgccaacacttgttattttttggttttcttcattatagccatcctactatgtgttaagtggtatttcattacggttttgatttgcatttctgtaatggccaatgatgttgaacatattttcatgtgcttttttggccctttgtagatctttagagaaagaaatatatatttaagtcttttgcctgttttttaatttcattgtctttattgttgagttgtaagaatttttatgtattttggatactaatccctcatcagatatatgatttgcaaatattttctctcattctatagttgtctttttatttgcttgttattttactttgatgcacgaaagttaagttttatgaagtccaatctgtttttttatttggttgaacaagttgtaattttaatgtatgtgtaaataaatttaaaaaataggactattatttctatatgttattctactccttgtttttttcacttaaacataggtcttggagatctttttatgttggtacataaggattgtccccattcattaattaataaattactgcatactatagattatatgttctgtaacttattttaccattcctctagggacctagggagaaggatttttgggttgttgcctattttaggaaatagcaaatagtgaatatctgtaggatagaattctaagagtatttctctgtaggatagattcctaaaagtcaagtttctcggtgaagtgtataaatctttttttttttttttttttgaggcaaggtcctgctccctcacccaggctggagcgtggtggtgatctcagctcactgcaacctctgcttcctggttcaagtgattctcatgcctcagcctcccaagtagctgggattataggcatgtgccaccacacccagctaatttttgtatttttagtagaagcagggtttcaccatgttggccaggctggtctcggactcctgacctcaagtgatccacccacctaaacctcccaaagtgctgggattataggtgtgaaccactgcgccaagccagatgtgtctatttcttttaatctgctagttttaccttcatatattttgaagctccgttattagggtcacaaacctttgtgattgttatatcttcctgatgaattgaccatttttttactatgaagtgtcccttgtagacagctcttttattcattctgacaatctctgatatttaattggaatatttagttcatttacatttaatgtaattcttatgtatggatttggatacaaatctgttcattcagaaacagtctgatttgccttttgggttgatatgatattttttagaattttattttaatttttctattgactttttatctatacttctttgctttttatttttagtggttgctctaatgataaaatatacattctcaacttcttgcaatgtacctaataatgtactgcttcagataaaatatgtttcttgtaaataggtcattctattctcattttaaggaatctaagagttaggaatgctaagtgtaatgcctaatatacctagctgataactacctaatacctaaatttcaaaggttaagtcaaacttatatttgcagaatatacccagtttggttttggtatatattatttccttttttaaatttctgtgttctgtgtgctaatattttgtttaagagtttggcttctatatgagtaagataaattggcttgtaaatttcctgtattataatgttcttgtcaggttttcttatcaaagttacgctgaactcataaaacgaggtcacagtattttcccctttttctaaaccctgaaaggttctgttacagattggcattacatttttcttaagcattaggtagaatttgttggtgaaactatctggcccttaactttctttgtggaaggtttataattacatattcaggtttatttcatggttttatgagtatttaaatttccttttcttgtgttggtttttgataagttctatttctaaatttcctctaaattttacatttattggcaaagcattattatggcttatacatattttttgtttgccttttctctattttttcttcatcaattttgccaggggtttattgaaaaaattctttcaaaggatgatcatttggcattgttgatcattttcattgtatgctttagtaatttctgcttttttgtgttaaattttctgttattttcataagtttttgagatagattctttgataactgattaatagtccctcttctttcctaatacagatgctccttgacttacagtggggttatgtccccataaacccattgtaagttgaaaatattataagttgaaaacacatttaatacacctaacctactgaacgttatagcttagcctatcctaccttaaacatgctcagaacacttacgttagcatatagttgggcagaatcatctaacacaatgcctgtttcatactaaagtgttgaatctcatatagtttattgaatattttgctaaaagtgaaaaacgattgtatgggtacttgatttacagttatactgaatgtgtattatttttataccattgtaaattgaaaaattgcaagttgagctatcataagttggggactgtctgtaatattcatttaagtccctaaggtacagctttagccatattctacaaattcaacatgtattgttactcattatttaattcaaatattttataatttatattgtgagttgtttgaactctgttccttactgtccaaacatttggagattttctgcttatatttttgttatttctagtttcttgtattgtgatcaaagaacatattctgtatggtttctgtctactgaaatgtattgagacttctgtggcctggcatatgtcagcctttttttttttttttttttttttttttgagacggagtttcactcttattgcccaagatggagtgcaatggcgtgatcttggctcaccgcaacctccacctcctgggttcaagtgattctcctgcctcagccttccaagtagctgggatcacaggcacacgccaccatgcccagctaattttttatatttttagtagaaacgggatttcaccatgttagccaggctggttttgaactcctaacctcaggtgatccgcccgcctcggcctcccaaaatgctgggattacaggcgtgagccactgcaccaggcccggtatgtcaactttggtaactatttcgtgggtacttaaaatgaaactgctttgcagtagtgtgcagtgttctagcaaatattcgttaggtgaaggttgacaatcatgttattaaagtcttctgtatctttactgattattttgtttgttcttgctgagttattttaaaatctaccattgtgcttgtggatttgtctacttttatttcaataaatttttctttattgataaatttagacttcttaaaatttccaagtgaactaattttattatcaatattaagttaaagtgtgcctctttaatttcataatgcttttttgtctcagcatctttatctgatatgaatatagctatatcaattttctttgatttttgtttacatggtctgtcatttttattttcttattagaatttttatcccttttttaagaagtttttcttgtaaatgacaaggaaatatattttatttggacagtctttatcttttgtttagacagtttagtccatttccatataatgtgctttctagtatatttggatttaaacttagtattttactgtttgatttttatttattccatgtcatgtttttcccactttttttgtgtccttttgggtagattgtttcctattactttattatccccttttattaggtacacattcttttattcttctattaatgattaccctagagattacaacagataccattgatttatcataatctaacataaattagtactttagtttcctccctacagcatagtgacctcagaatattataactacacttgtgctccttctgactcatatacatttgttgtcatagctttttttttttttttttgagacagagtcttgctctgttgcccaggctggagtgtagtgcgcgatctcggctcactgcaaactccctctcccaggttcacgccattctcctgcctcagcctcccgaatagctgggactacaggtgcccgccaccgggcccggctaattttttgtatttttagtagagacggggtttcaccgtgttagccaggatggtcttgatctcctgacctcgtgatccacccaccttggcctcccaaagtgctgggattacaggctgtcatagcttttaacctgttacttgatttcaaccaaacttttttattgtttcataatgtcaatcaatgtacatatatattttgtatatatttaccatttttgttgctctttatctttccctgtgtcaccgatcttctaactagagtcattttccttgtacctgaaaacattctttagttagtttctttagtgtggctcttttggtgatgaattggctcactttttggttgtctgaaaatctttacccttcattcttgaatatcatccgtaggtataaaaatataggttgcttttattatcactttgaaaatattctgttgtatagtatcttccattctttttcctgcaaggtcagctacttgtctatttgtttttttgtttgtttgtttgtttgttttttgatttttttttttattttgagacagggtcttgctgtgtggcccaggctggagtgcagtggtgcagtcacggcccactgcagcctcattctcctaggctcaagcagtcctcctacttcagctttccaggtagctagtgatacaggcatgagccaccctgtgcccagctaatttttctaatttttgtagagatggggttttgccatgttgcccacgctggtctcaaattcctgggctaaaatgatcctcccgtcttagcctcccaaagtgctgggattacatgggtgagccactgtggccagaccagttgttgcttttttgtaggtgatctgttgttatttcttctggctgcttttaacaaacattttgctgtctcaagcacctgcttgtggttttttgtttgtttttggttttcattttgttttggttttggttctggttcttggaagaagatcttgaatctgtggcttgatttttaaaatcagttaagttttcagcttttatttcttcagatacttctgtatcatttcttttcttctatcatttgggattcagattataggtatccacacccttgttaagtatacttttttctataatttttctaattctcacatagttttttgttttatatagtttttcttcttatttatttttgtaaggtaatgatcagttattttcttccatatggatacctcatatacctttcttcccaatctttaaaacaaccttgccaaaattattttttgccatttttacagatattattcagagaggttaacgcccttgcccaacttcacagagcagccaagcaatcagagctaacatttgaatcaaagtcaaatcaatttagtatttcttgctctaatttattatatgaggttatggttccttttttctgttttgctcacttgatttttggagatgagctgttattcaaaatgttgcatacattaatgaattagtctgtcttaaaataacatttttccatttcacctatatttattagataaatagaagtgtacaaatttatgggccaaatattatcccccttaaggaatttattttctacatggaaacaagaatgtatacagtttattctgatagaggatacgaagagatagtttccatggttagaaacaaataagaaggtagtgtctcaagtgatggaattaagaaagaattcattgggtaggtagaagttatgaaaagaaaagatggtaatgtgaggatttttgtttgtttacaagagtgaaaaacagtttgttattacaaataaagaaaatcagtactaatatttcatgttctatttcccccaacaaatctctttgtacatactttgtcactaattgaatagtcatgtaagcagtgaaattttgtacgtcatgatacattatacacagtgattgaaaaagtcttttttccccaggttatttcatttctggctgcagttttgcataaaaagggaactcgtgaggatattgaaaataacatgccagagtttttactaagaagtatgaaaaaggaacccctttcttctacagcaaaaaaggtaaaatctctagacaatgtatattctactcatgatgctggtattacaaaagcatatagaaatatttaaatatcacacattaaaatgtattggtatacattttaaaacctaagaatttaaagatgttattaaaatatttgttttataggcctaatttttgaaagattaccaattttattcccaagttaaatttgattgactgtcatggcaaaacagaatttcagcttggttttgctttgaggttttaatctgttggttggctggatttacatgatttacttaggttgatttgttaaacttacagaatgtatatgtaaagttaattgaaaccttcattatattgttttttatttatgtgagaatgaaaaggcgatagttacagatattggtaacaaaagtgcgtcattgacttatttcaagttgcctagctaattgcatccaaaaaatatgaaataagttctaccaatataggaaagttggaatcagaaagactaggtaggtctgtgcttatttctctttctgcccatatgactgaatgctattcatatccatacttcagttttcttcttcataaacgtatgtttataaatacgttatatatgattcttacaaaaaagatttctaataaagcaatgaaatataaaaaagtatattatacttacatgtcttttaaaaaatattatcctcagcctccaggaaaccagataagaataaaaatgaagtgattttatgaaatcttttattatatttggtaatgagctacttacagcaagttttaaaacagactcttttatacaagtcttatgtacaagattgctgagaagtccaagtttactcttgtctatcataaagaccatttcaatgcaaacttttcagaactactggcttaagatataattgctatcattttaaattctctttatttttcagtagaataaatgcatcctgagtatcagattcaatgtgatcctgaagagaataatggttcttaatgtattttaagtattcaatagctcaagtactgtttttagctctggattcagttgttccctggttctaaatgtcaccacagagcctatatatatctcttttatgccactgtgacagcagatagaagagagaacaaagaaggaaaagtaatattttaaatatattaaaatacttaaagatatttaaaatattatagaacaagaatgggccaggcgcagtgattcatgcctgtaatcccagtactttgggaggccaaggaaggcgaattgcttgagcccaggagttaaagaccagcttgggcaacatgtcaaaacctcttccctactaaaaatacagaaaattagtcaggtgtggtggtgtgtgccagtagtcccaggtacttcggaggctgaagtgggaggatcacttgagcctggggaggttgaggctgcggtgagccatgtttgcaccactgcactccagccagggcaataaagtgagacccctgtctcaaaaaagaacaagaatgaaagaaaagaaagttaacaaagatactcatttgataatgtggtaaaatatgcttataatagttacctcagttgactccagttcctctccttccttctttcctttctttctttttttctctttatatatatatatatgtgtgtgtgtgtgtgtgtgtgtgtgtgtgtatgtatgcatatgcgatgtatcatatcacacacacacatatacagttgtcccttggtatccatgtgggattggttccaggacctctcttgggtaccaaaatgtgtggattctcaagtccttgatataaaatagtgtatttgcatataacctgttatcctcccatatactttaaatcatctgtagtttacttagtgcaatgtaaagtctacataaatagcttttatattgtattgtttaggaaataatgacaaggtctgcgtacatgtttagtgcagatggaattttttagtatttcaatttgtagttagttgaatccactgatatgaaacccacagatatggaggaactgtaaattccttgctataatgtacattgctatttaccttcttcagttgatttcttaatttatttattttcagtctttttgtattctaataaattaccttaaagctataagtgttcctttgggccaggcatggttgctcacacctgtaatcccagcactttgggaggctgatgctggaggatcgcccaggagtttgagaccggcctgcgcaccataagaataccctgtctttacagaaaataaaaaaataaaacaattagccaggtgtggtagtgtgtgtctgtggtctcagctactggggaggctgaggtgagagaatcgcatgagcccaggagttctaggctgcagtgagccgtgatcatgccaatgcactccagcctgggcaacagagaagaccctgtctcaaaaaaaaaaaaagttcctttcagtactcctttgtctgtgttctatagtttttaatatgtagttttttcgttagtcttttctaaattatctgtggccctaatttttattctcttttacccaagtactatttgaaagagaaattaaaaaatttccaagtgaatagctattgttggggctcaggatgatgggagggctgaaccctttttgacaattctagttttgttgcatcagataacagccttgatatttttttctttgtgattacatccatggatcagtttttatgctttgatgtagtgcattgtgtagtctctgttgttttaaaatgttgcttatattgtgcattctttgtaatcatggtcacatggttttatatatttctatttaatcatgtttgttaattgcattgttaaaatgtttaatagtgttattttcttcttgtctgaacagttggatctggaaagaaaaatgttaaatttttttatttctctttgtgttcataccaactttttcttaacgtcttcagttaattcttcagaggccaggtgtggtggcttgtgcctgtagtcccagctactcaggaggctgaggtagtaggatcacttgagctcaggaggttgaggctgcagtgagccatgactgtgccactgcactccagcttgggtgacagagtggtactctgtctcagaaaaaaaaaaaaaaattcttcagtaaattttatgtgtttgtatattgctctcacacttgattatccataggcttatctgcctatggaattttaagttcaaaattttcttttataatgacaaaacatcttctgtcactccatattgcagatgagagttcaatgtcaacccgatttttttccttggaaaggattttttttttaattgtttggaagtattaaggacttttttaattgatgaaattcggaaatttccatgagccctaacactcaccatagaattcttccaaataagttttgctttagaaaatatatatacagtgctttatgcagggaaagttgcatactgatgctagaatcagtttctttgatgactggtgtaacttttccttcttaaaattacttggccattatttttcttgacttagtctttccaactaccttagctgttttgttgagttttgttttgcttgttgttgtttttaggttccttctaggaaaagtaaattttttagcgggggagggcagggggagtttttgctttcagaggtgtagggcggattgctcagttcttcaggtgtgccagttctcatctgctcctgcactgttctgacctgctggtactgcccttccaggcattctgccactattatggatttattatgtttgttcttttgtttcattggcatcaatacaaacgtgttgagttagtcatttgaactggaatttagagtttttaatggcatcaccagtgacattctacagtatttcccagaagtaaatacaaacaaaaattataactttgaaagttttaaaagataaatttgtattggttcatttaaaacaatgtatgttttaaaaagacagtttatgaaatggagaagaaatcatttcttttgtatttattatgctaatgccagaattacaattgaattctgaaaaattaatgttgaagcttgttgaagaaagccctttaatgaactgaatgttacaaattaaggagtggtgggtctaaggtatgtgtgtgtgatacgatacatctcatatacatttaaaaacttttcaagtgtgaataaatcatctgaataagaatgcatgaatgttttgtgccaagaataaattcttaaaggaaaagacacaagctctacattttaaacattgatttttggaatggttctttagatgtaggctaagttttgattgaaattcaatttttatgaatcataataaatttattataaaatattactatcttgcatgatgaagctttagagattctaagtaaaattcataattaatgcaaaagaggaggatttttgtagcaatcacaacaccagcatcggaagcaatttcaatgacaatttaacaaaaatattttataattattttatttactatacactatttttttagttcttcatatgtaccaagaggattatgttgcacatgatgctaccgtgagcatccttatgcacaacttttgcaataataactgtaggataaattcttagtactggaattggatagcaggtagagctggatttaggggattactttttgataactggagttaaattaccccatatccccacaagtgatgtataagaatgtctgtttccaccttttcgtttgcactaggtattagcaaacataaatttatgactacctgagagatttaaaatttttatcttgctttgatttacatttcttaatgagtgaagctgtagcatttcagatgtttaaaagctatttttaaatctaattctcgtttttaatcatagtccttgattaatagtccttaacgatatatcctggaatctaattttttgttcattatatattttgaaaatatttcttccccatgtagagtcagctttgaattatttattgattttttaaaaatgtttatgtggttacatgtattggtctgtatagtttctgggttttatgtttgcctagaaaagccttttgtactctaaatttataaatacattcattcatggttcttttataatatgtgtgattttattttatacctttatatctttgtttcagctagaatttattttgctgtaggtgtctagtaatccaattttattttcctcagttggttaaccagttatcttaatgtcatttgttgagtaagcctgcttttccacagtgatttgaagggccactttggtgtaaaattaaactcatttctatttctagacgtattattctgtcctaattatttgttcatttctcttccagtgctaaacagttttagttattttagctttataatgtaatttattatttggtagttactcctcaagttttctcaacttatgaaaaataaattttctcaaatttctcctcaaaacctattgatatattagttgatgttgtgttgaatttatagttaactttgcttgtcatttccattcttatatttcttatttacttctcttttttaattgcaagagttgatatttattgatctggtttgtaactttctgttttgatagaatatcaagttttggcataatgccaaactttaatacttcatatagtacttagaaaatagaaggtgttcaattgatgaatgaattaataattgaagccatacatgtcagtgctaagttaggactaataatgtatgttcagaggacagtgacagtagagttgaaacaaaggtttcacatgggaagaagtgtgatatcaaaatgaaaaataaattatacctttacagaaaaattacagaatgtaaaattggaatctttgctagaaaactcaaagtactaaaaaaaaagttttcgtatttatctctacaatcttaactctctcaaaaatacccaacataggtaattaatttatttaatgccaaaacttgatattctgtcaaaaattaggctgtttttatacaaaggacttggaagagcccctgactacagtggattctaaactgaaatttctgtatatgaaataactgcagcatactgaaggagaaaatgatcagctatacacacagtagggtgtaaattaattatgttaggtatttttgagagagttaaggttgtggcgataaatacaaggctttttttagacctttgagttttctagcaaagattccaattttatgttccgtaatttttctgtaaaggtataatttatttttcattttgatatcacacttctttccacgtggaacctttgtttcaactctactgtaatctcactgtcctctgaacatatattattattccgaacttagcattgacatgtatggtttcatgtattcattcatcaattgaataccttctattttctaggtactatatgaagtactgaagttaaggtaaataaagttacacatctcaaggacgtagactttttgattgaaggtgctaacaggatatgtcatggtagttaagagttttagaattaggcagacctgggttcaaatacttactttgctacttaatagcagtatgaccttgagtgtgttgcttaatatctctgtacctcagtttcctcatctgtgtttctgggtaaagtccctgaattaatttctgtaaactacttctaaaggccttggcacacagtaagtgctcaataattgttatgttattattaatactattactacttctgccacaaaaattgtcacgttaatctttgagtatctcatcacagtccacactacatcattcttctatgccgtggttcctgaggaatcagatttgatagaaaactccttaataattgagcaagatttattgaaagatataaataattcagtattctctagttgcattatttaacctagcttctgttaattttaataatacgtaagcaaatgaattttaattttatttgtgttaattttatattcagttttataaaattgtattttagcttcagaataagaattatcacccttcccccatgtctacagcaataccactctgaacacaccacatctcgtctgatcttggaagctaagcagggtcggacctggttagtacttggattagaggaatagctcccagagttgctttgtgtgtagtgacttagcagttggacactgctttccattttattattttggcatcatttgcttaaaaaagacttattaaatgaaatattatttattggattgtaggaaatgctaagttcttatgtactttccctggactctgcataatagcataactcagttctctgacatctttcactaccaaaatgaatttttgaaccattatttcacctttcataattttgaagaccaatgtttgtaagaaatatcaagaattatgttgccaccttaatttttaaacatcttctggaatcttagggctgatgccaggactctttagattcattggcacctttgatgaatggcctctcaagtggaaaactactaagactgctcagatgcaatttgcacctagcattgtcatctcgtaatatacaaaaaaatcaaagggagacactgtaattggacttagtaattggaggcctaatttcatatttgaaagttaaaaatggaaatcataggattaaccttcacccaaaggacggacatacttgagatgaatcaagtataagaagtacttacatatgcttgatgatggcttgggaaaaaggaactctcacgttcagcatgttgattttctttcgttttcttctttctctttccaaaacacagtcacaaatttgactttttagagttgacaaatggcctaggttaaatgtttcacagaaaacagagcagaatttagagcagtattgtattatttcttggttaaactgaattttttcagtatgtttaattggttcatctctatcaagtagatcaagtataaaactttagaaaataatcgtactggtaaccctattaaacttaacaggataggaatagtggtaacagggagaaataaaaacattaaaaagttaaaatggttgatgacagcaggattctgggttagtacaggaaaggtacatgaatgtgaggaataaccagagagttacgttggtaatcctcagagggactgatttggtaggcattattagggcacaagtcccatttacctgagtttcaagagagagcaggaggagagttaagcactgataactcttgatctttgctatagggagagtagagtaatgaggtaatagagatagatgttgggttaaggaaaagaagttttaaaaaatttttgtttttcggatttttttaaccctgggaaatattctaacatgcttgtccataggtgatgtggttcattaaaatggaaaagttaatcaggtaggggagattgggggcagtttctgcagcattgactttaggttggcaagaaggaatgggagccactgtatgaggggtttttttggagaagaacatgagcagcgtacccatggcaacaggtgggagggcaaaatatatggaaatgaatatagataggttattgataggatactgagagaagttcatccaggaagttttcttctgattgcttcaattttccagtgaattttccagttctttaactgagagtatctgaaagagggggagcggaaatgggctaggaaaatgcagaaggaaagagagctccaggagaccatatatttcaagaacacgtggcctgcttgtgtatgtacattacccacttggcctttgaagctattactgggatccagattttattcttttctctcttttggaaagttacttctctctcatttctcagtgcctttttggtagggggaaataaaaaacacgtgtttctttgagcaaggttaggtgtctgtcttgtcctgataaaaagctaattaaacagcaaattattttttgagaatcttcaatgtccagatatagctaatcactcagttgtatttattgttactaactagatgtcaaaattaaggaagaggactattgatattgatattgtggatttcactttgggattctttttcagtttttaaaaaacagcaaaatttttttattcttgttttagatgttcttaatagttgctcctctttctgtcctctacaactggaaggatgaattggacacctggggatatttcagagtcactgttttacatggaaacagaaaagataatgaattaattcgtgtaaagcagaggaaatgtgaaattgctctaacaacttatgaaacactacgcttatgcctggatgaacttaacaggtaatgggaataataggaataggaatgattgtattaatagtctacttacatccctttatattaagagtttttttttttttttttttgagacagagtcttgcttttgtgtttttagtaaagacggagtttcgccacgttgcccaggctggtctcgaactcctgagctcaggcaatccacccacctcagccttccaaagtgctaggattataggtgtgagccaccgtgccaagcctatattgtgattttttaaaaaggaataatgatgattcctttgcttgatttaatttcattttagaattattgaaatatttagttcataataacttactctctgagaaggaaaaacctgcatcaggttttctagaacttcttattctatttcttacattgaatacaggatacttcttcaaacactgattgttaaagaatgataagacttgtcctaaatctcatgtacagccttttatgcagacactgcctctgaactaggtcagtaattttcatgaattatttcaattatgggagtctgttgtgaatatagaggggcaaaaactacacacacacacacacacacacacacacacacaacacacacacacacacacacacacccacacccacacacccactgtagcatagagtgtgagggagaagtggccaagaggtaacaccagtgagataagcagggaaaagattatagagagtattggaaggtactttgaggattttgatctttatcctgagagcaatagagtgccccctacagtgttgtcagcagattaccgataggataaaaatgatcagatttgcactttgtaaataccttagcttctgtgtgtgcagataaaggagagccaagctgaatggagaaggaccaattaagaggcttgttatgtgctgaattgtgtcgcttctcctcaacccccattccacaatttaaatgttcaggtctcaaccccagcacctcagaatgtaactgtgtttagagacaggtctctttgattaagttttaaagaggtgattaaaaccgaggctgattgggtggggcctgggtccagtatgactggtatccttataggaagagaaagagataccaaggacacacacacaccacagaggaagggacttgtgaggacacagcaagaaggcagtcatctgcaagccaaggggagaggcttcaggagaaaccaaatttgctgacaccttgctcttgaaattcgagcttccaggattgtgaggaaataaattttggttgttttaagccatccagtgtgtggtattttattttggtagccctagcaaaccaatacaaggcttttatagtaatgtggtcacgggaccatggtagtgaggtctgaagtcttcatagttgttccagcagtaggctgggccttggtaaaatcattagtttccatctgcttgtagcctagatttgtctctacagggatacaatttataccttttaggtgaagattaaagcatggcattagaaacagttatctagtaagtctttaaaatgtttagacattatagttatactcaatttgaactactgctaatgaaggagttaatgatattcccccaaagtcaaccgaagtttagaaaattggtaatttttttaaggtgatactttcacatcagcattaaaatgatttagcataggatgaaaatgatgaacaattgatagttgtctcaaattttatgagcacacaaaaaagagagtaaaaaaatcactaattagccatgtggctttgggtaaattagcccatctggaaaatgacagaggatgaattaaatcagtctttgtgaaaactagcccctcaagcccagctggagagttgtattaaaatcaactttaatgagagttaatttgtgtagaataattatgccatttcaggaatacaatttgatgaatcttgaccagggattggtaaactttttctgtaaagggccagatagtaaatattttaggcttttgggccacatatagtctcggttgcatattcttcttttttatttttatgaccctttaaaatgtaaaaactattcttagcttactgaccatacaaaagtggccacgggctggatttggccatgggcagtagtatactgactcctagttttgacaaatgagtgcaatcactatcccaaacaaggtaaaaactatttttatcatcccaggacttttcttttacctctttacagtggcttttcctcaaccctcaccttgggcaactactgattttaatttctgccacttataggtgagtttaagctattacggagcatgtcaatggtattatacaggaagcacccttttgtgtgtgtcgcatcttttgttcagcatgttttttgagattcattcatgttgaggagtgtatcagtgattgttctttcttaatgttgcattgtattccatttcatcaatattcacattttgttacccattcatttgaggatggatttttgggtttttccagttttggattattatagataaaacttcaaggcatatttgtatgtaagccttttttggacatatgttttcatttctcttggagtagaattactgtattatatggttaactgtaggtttagctttagaagaaactcccaaaccattttccacagtggttttactccagctagcaatgtgtgagagttcagttgcttcgtattctcagcaacgtttggtattgtcagtctttttgttttagctgttttagtagatgtgtagtagtatcttgtagtgtaatttgcatttttctgatccatgtgcacttggaaaacaatgttctatagttattggatgtagtgtttataaatatcaataagactagattggccaagatgttgcttaggtgttttctatctttgctgatttccttttcgattggcttacagtatctgagagaggagagttgaaatcttcagttgtaattgtagatatgtttatttctcctttcacctctgtcagcatttaatttagtattttgaagctcttttatgaggtgcacatgcatttatgattgttattttttcctgatgaattgatccttttatctttaaaaaatatacctatttatttctaataatatctcttatcttgatgttttatctgatatgagcatagccatattgtggtacatttcagtagtttgttcctttttattgccgatggtactattatatagctatcccatattttgtccattcaccagttgatggacatttgaattgtttccagtttttgactgtatgactaatgctgctgtcttatgctgagtcttatgcttactgcatgtaaatagcttttcctgtttttattgcagtatatctgttcttaatatttggagtgagtctccaaatattgctttttcatccattcggataatctttgcctcttatttgggtatttagaccattcactttgaatataattattggtaaaattggatatggagctaccacttttgtcaggtctgggatttaattttataaatcaaacttataagctaataaattagcctgttactatttcatggatcctgacagaagactaatctgaggcatagagaggttaaataatttttctaggccttcacaactaagtcagtggcagacatgaggactgaaccttgaccatctaacgccagacctcaggttttgttttgttttctttttgagatagagccttgctctgttgcccaggctggagtgcagtggtgctatcacagctcactgtaccctcagtctcccacctcagccttccaagtaactaggactacaggcatgcgccaccatgcctggaaaatgtttttgttttttgtagagacaaagtctccctgtgttgcccaggttgatctcaaacttttggactcaagtgatcctcccacctcggcctcccaaagtgctgggattataggtgggagtcaccatgcctggccaaaccttaggtttttaaccaatatactgtaccaccccaaaagatgttttgcaattagataaatgtaataaattcttctatcatagcatcagtcatattttaattatttcttacctgtctgtccccttagactgtaagctctttggtgtaggaaatttttatctttaatttctgtatctcagtacttttagcacataagagttgccaaataaatgttttttaggtgactttttttctgattgttataaatattgttataaatattaaataagaattctgaagtagaattatgtaactataaatcatatatttataagattagaggaatgtttatgattttatatttatttatttagttgaatttatttgttcaaatgcctttattttgtttgtgtttggcaaatatttaaaataattaatattttacctgagcaaatattaagttgtttttgtgaggatagtgctctgtgcatttatcacagatactctgtggaggggatgaacgtgctatgaactgaatgtgagtgagctgtagtttttttcttattgctgttatattttttacttcatttcagtttttatcaaagttaattatgtatatgatttaaagagccaaacatgataaaaggcttttagtgaaaaactgcagttcactgtccgccaattacctttacctcaactcttactgatcttcatagtctttacttccttattgctaaagaacatgtttatgctgcaacttttcaatttttctttagttttcagcatcatctattgatttctttttaaggaaaattaggatttttgcccttctcttgcccgctttaggatgacctggcccatctactttgtgcagtgggaggattcttaaacagactattgaacatttacatgactccaatttccagaggcatctggagccaccaattcttaacttttcaagaatgtgtaaataatatgaattagattgcttcttggctttttccactattggcataggacactagtctctgcttttgtcagccatcttgtccatgttctttttagcttctagaatttttgctatttttctcctgtctttgttcttgaggcttctagcttttttcagctttatattaagaaaatgatgaaacctatagaaaagttaaaataacagtacatgagcatctagattccaacagttttgtgtgtgtgtgtgtatgtatgtatatacattcaaatgttggcaaaatgtaagttaatgtatgtaaatgtgtgtgtctatgtctatgtctttgtgtacggtggtggtaatgagtcatttcagcaagttgcataaaacatgacatccttatccctaagtattttagcatggatttcctaaaactagtgatacttcttgtcataccacattatcattgtcacacacaagaatattaatagcaattaaaatttcctcagttattctcaaaacatctttaatatcttatgtttataaagcaggattcaataaaggttcaggtgatgaatttggttgtctgtttattcttctaatctacatcatttttccaacttgtattttttaattatatgactttttgagaggaccaggccagtcagttgttttaggatatctcacatattagatttgtctgattactttctcaagatatattcatctgtcatctgtattttagtaaagtggttttggcccaaaggcttaaatagattcagattaaacatttttggcaagaatgcttcataaatgatgctgtggacttcatattgcatcacttcaggaagtacctaatgtcaggttgtttcactgtcagtgatgccaagtttgtcccacaggttaagaaggttaccatcatcagatctctccattgtaaagatatgtttctccctttgtaatgatcaaataatctgtggagtgatactttgccaccatttaaatatcctggtatccctcaatccttttacttagtagtattagcacatacaaattgttcttgtctgaatcagttactttattatgtttggcaaaataatatttttctaattttattatttcttttctacacattaattaccggtattctcctgtaaaggaaagctttctccattaattaggaattaaccacaattttgactttaaaaaagcaaggtgaatgctcgattctttttctttaatgactaatttttggagtaagaagttagcataatggtcatctacaatggtggcaaagtttcttacacccttcgcttgcttgcccgcttgcttgcccgcttgcttgctttctctctttctctctttctttctttctgaatattgctatggacttgaggattattgaagtatatttgacataaaacgtacccttgtaagttagaatgatttttagtgaattttaaaagttgtgctatcaccacaatctagttgtagaacatttccatcacctcagaaagttatttgtctatagtcagtccctgcttccatctccagtccctggcaactactgatctgctttctctttttatagatttgccttaactgggtatttcatataaatggagccattcaatataaagtctttggtgtctggcttctttcacttaacataatgtttttgaagttcatccatattgtagcacatttcagtagtttgttcctttttattgctgaatggtactattatacagctatcctgttattttgtccattcaccagctgatggacatttaattgttcccagtttatggctatacaaatttgctgctgtgaacattcacatacaagtctttgcacctaagttttcatttttcttggatagatacctaggaatggaattgtgaggtcttatgctaagtatatgtttaactttttaagaaaccgccatctgttttagaacaatcgctgtgcttttccaaaagcagtgtttgaggattctggtttctccacatccttaccaacacttgatattgttaatcatttttatcatagccattctagtgggtgtgttgtggtatttcatgttttaatttgcagttctctaataactaatgatgctgagaattttttaatgtgcttatttgacatctatatcttcagatagacatttggtgtctattagaatcttttgctcatgttttaattgggttgttttaaattttgttgagttataataatttttttttttgagacggagtcttgctgtgtcaccaggctagagtgcagtggcgcaatctgggctcactacaacctctgactccctggttcaagtgattctcctgcctcagcctcctgagtagccgggactacaggcacacgccaccgcgcccagctaatttttgtatttttagtagagacaagatttcaccatgttggccaggatggtcttgattttctgacctcgtgatccacccgcctcagcctcccaaagtgctgggattacaagcatgagccactgtgcctggctgagttgtaataattctttatatattctgtatacaagtcctgtatcagattatgatttgcaatatagtctgtagcatgtctttttattttcttaatggtgtcattggaagagcaaaagtttttaactttgatgaagtccaacttatcacactatttttaattgactataagttttgtgtcatatctaagaaatacgtgcctaatccagagtcgcaaattttttttcccattttttaaaagtttgagttcatatttaggtctgtgatctgtttttagttaattttcatgtgtggtgtgaagtaagtgtttaaattcatttttttcatagaactcctggatttttgtttattcaatattttcaattgtagtcaatatttgtaacaatgctcaaatattccaattaggctggcgtctctattctttggacatattcgcatttgtctttagatacatctgtgcttttcggctgttcagtgtttcccccaacatatgcctgaaatcagctgtttctccattcttccgtgaggctctcattcctttcagtaaagagaccactatgggtgctcattgctactggggtaacaatcaactctaaactttcttagtggacagggctatggaatacagcttttaaaaatcatgagtttatattgatatttttcattcagaaaaatattgcaataaaacattgcaagttttatttcttttatatttgtttttctggtttgttactttaaaaaattcctttattgtcatttcagtgatgtttaaatgaaatttttctttttaccatcattaaagaatgtctataccctttcttttctacgcattttatttttgtcgactgtccaagggtgtgaccatttaactaagtgggtaagaatccaatggagtcatcaaagagtaaaaaggaaaaaataattccaaaactttgatagagaaagctactgtctaaaattgtaaggactaagaaaggaagttttctcaacctcacccttcttttttcttactttatagtttggaatggtcagctgtcattgtggatgaagctcatagaatcaagaatccaaaagctagagtaacagaagttatgaaagctttgaaatgtaatgtccgcattggcctcactggaaccatccttcagaacaacatgaaggaactgtggtgtgttatggactggtgagagaaaacactttttaaaaaattgtttaatagttcttcagctgaatactgtcttgtttgctaatcattagtttccaaacaaacgaaacagtcatttgtctggttttagatgtgtttgatcccagatgtggtatacacagtagagagtcccatgaaaacctatctttatatatattactcttggtccctgaagtaaatatacatgttcactgccagtttcatcctcatatcatagttagaacctgaaactgtcgtaaagaaagaacattctgttttcttggcttttgtttttgttaccgttgataatcaagtaatgtagtatatctcttagaagcaagaagttagtgtttttagataataaagcccttacatttttcttattgtctttataaagggctgtgccaggccttttagggagtgggacctacttcaagaagcagttttctgacccagtagaacatggtcagagacacacggcaacaaagagagaactagccactggccgaaaggccatgcaaagacttgccaaaaagatgtctggctggtttctcaggcgcaccaagactcttatcaaggatcagttgcctaagaaggaagaccgggtaagaaccgcatttgtatatattattaatttgtggtcatattttttttttcctttttaagaaaaagtctgtctcctgtggcattttgtaaatacagttttttgccttttattctgtatggaaaaaattgttgcgcgcagaatttcagaaaccattgattgagctcagttgttttccttactgactttattaacctgttagctaacaggtttattattagtatacattaaactcatttctcatcaaaaccttttttttttttttttgagacagagtcgggctctgtcacccaggctggagtgcagtggcgcgatcttggctcactgcaacctccgcctcccaagttcaagcgattctgcagcctcagcctcccgagtaactgggattacatatgtgcaccaccacgcctggctaatttttttgtatttttagtagagacagggtttcgccatgttgtctaggctggtttcgaactcctgacctcaggtgatccacctgcctcggtctcccaaagtactggaattacaggcgtgagccaccgtgcctggcctcatcaaaacttttgatgcagtttttccccagtaaagaaggaagagcttctctctgcagtgtgttttctgttcacacgttgtccttcctatactgtgtactatccaccacacagtgtattctttggtaccttaattctagctgtaggatcaaagtggttaagagctttttaaaaaatatataggtttgtttcttgtagaatgctatttgcagttacacaactaacctaacttttagaatttgtaggaaaactacattgttaaattgttcaagaaaatatgaggagtggacttcaagaggattttaaaaaaatatagtagtcttcttttatagttcttcatcttgtgtttcttctagcttgggcaatggaataaatgttctgtagattactatggaactaaacctaattaatgttgtcccaaataagggcaatcctatgaaatgccctctaattttagtgtatcctcttgattgtttctttaaaaagatagatttgaaaggaaaatacgatattgatatgcaagttggggaaatagatacatctgacttttgatatttatctaaagcaaatattgttactaaattgagatacttcatgaactctcacttttaaaaatgttttatgcaacttcatatatgtgatttagctatctgtctagtaggaacagtacaaaagtataagaaaagaattgttcatagaggtttagagcttggcctctgaaatcaaatactatttgattagagtatttgtgacttgcagcacctctgcttagagttttgtgacttggagcaatttgtgaggccctggaacctgggtttcttcctctgttaaatggtagtgatgataatagtgcctgcctcacatggttactctgaaatgcatgacacataagaaatattgagtaattggtactatgtttaataataataaataactgaagatacctttgtacttcaatcattgaccaccaacttctatattctctttttttcttatatgtacttttatatttaaggttggggtcaggctgtactaaatattttatataaacattttttaaaaatctagcatcaggagggggcaggctggatgtgtgctgccatgcatccttcttcagtctggtttgggtctttaaaaaataaaagataaaaatagcttccaaaagagttgtggtcatcctggctaaaggagcagaggaaatggaggcagtcagccctgtagacatgatgagacaagctgagattaaggtcaccattgcaggtctggctggaaaagacccactacagtgtagctgtgatgttgttatttgtcctgatgtcagtcttgaagatgcaaaaaagagggaccaaatgacacgatgtttctaacaggaggtaatctgggtgcacagattttatttgagtccgctgccttgagagagatactgaaggaacaagaaaacgagaagggcctcatagctaccatttattcaggtcctgcaggtctgttggctcatgaaataggttttggaagtaaagttacaacatacctacttgctaaagacaaaatgatgaatggaagtcattacagctactctgagaattgtgtggaaaaggacggcctgatttttacaagtcggggggcctaggactggcttcatgtctactcttgggattgttgaggcctaagagccaaagaggtggtggctgaagtgaaggctcgacttgttcttaaagactagagcagaaaaatgtgaccatcagttagagaaataagccatttggaatccattctcattgtgttttttaaaaacagaaaaatggtaggttaatatgctcagaagccatcatcagtcctgctgttgtgaagtaacaactacacagagatttctcaacctacaaattgtgtctgtttttttttttaagacggagtctcactctgtcacccaggctggagtgcagtggcgtgatcttggctcactgcaagctccgcctccctgggttcaagcgattattctgcctcagtctcccaagtagctgggactacaggcgcacgccaccatgcccggttaatttttgtatttgtagtagagacagggtttcaccatcttggccaggctggtcttgaactcctgacctcgtgatctgcctgcctcccaaagtgcttggattacaggcgtgagccaccacgcccggcctgtgtctacatttctgagcctgtttacagaataaacatggcatttagggaaaaaaaaaattagcattgttttatagagacattactgtatttgcttgtatgcacctttgcctgtttattgccaataatctgatgtagtgatataagcatacaaatatttacaaatatttatatgtttctattttacaaataaaaaaatgtcactgctttgtccctgaagtcaggaagtgccttgccagtaaaggactaccttttaaagttattttgatgttggataatccttgtggccacccagaaccccatgagttcaacatcaaaggcgtcaaagtggtccacttgcccccaaacacaacatgtctaattcagcttctagatcagagggtcataaggacctttaaggctcattacacctggttctctatggaaaggattgtcaatgctgtggagaagaaccctgatagaatatcatgaatgtctggaaggattacaccatttgaagataccgtcgttgttatagaaaaagccatgaaagccatcattcctggaatagtaaattcctgctggagaaaactgtgtccagatgtgcatgacttcacaggatttacaacagagccaatcaaataaatcatgagaggcaaaaaaggtgaagggtttcaagagacggatcttggagaaattcaagagctaatttaaagaaattcaggacaccacaccagaggaattaatcgaagatgacttgatgcagataagtgctttcaaaccagtgccagacgatgaggaacaagacgcagaaaaagcagtgccagaaaacaaattgacattaaataatgtggcagagggattctgattatttgagactgcttttgacttcttttatgacatggacccttctatgatatgggcactgaaactaaagcaaatggtggaagaaggactggcaccatatagaaacatttttttagagaaatgaaaagcagaaatgtcagacagaaattacgacatgtttctgtaaagttacaccaagtgtgcctgcctctcctgcctcccttgacttccttttcacttccttcacctcttcatttctgccacccatgagaaaacaagaccagcctctcctcttccttattctcctcagcctactcaatatgaagccctttatgatgacctacttccacttaatgaacagtaaagatattttcacttttttgtgattttcttaataacattttctttttttctagttttatcgtaagaatataatatataatagatacacaaagtagtgtttctcaactatttatactgttgttaaggcttccagtcaacagtaggctattagtagttatgtttttgggaagtcagaagttatacatggacttttgactgtgtggggagttagcaccctagcgccatccatgttcaagagtcaactgtgtaaggaacatcatttgtttgttcatattatgatttcttttaattaaaaaaattctatgaggtttatttgaaagtgaaattatactttatattatccagggtggggtggagagcaaagaatataagacagtcagtagaaatcatcataatgatgtaaatagagggaaaaattagtttatagcaattttcactattttttttgagacagagtctcgctctgtcgcccaggctgtagtgcagtggcgtgatctcagctcactgcaacctctgactccttggttcaagcgattctcctgcctcagcctcctgagtagctgggactacaggcgcgtggcaccacgcccagctaatttttgtatttttagtagagatgaggtttcaccatgttggccaggatggtctttatctcttgaccttgtgatccgccctccttggcttcccaaagtattgggattacaggcgtgagcctctgcgcccggccagttttcactgttataatctatgaaatcagatgtagattatgatttttattattgttataaacaaaatactaataactaccttgtattttatcttggcagatggtgtattgttctttgacagatttccagaaagctgtctatcaaacagtgttagaaacagaggacgtgactttgatacttcaatcttctgagccttgtacctgtaggagtggccaaaaaaggagaaattgttgttataaggcaagcatttcaatatatctttataatcatgcttttgattacatagtactctcttctagtgtaaaagaaagtagcagatgataaaataccttttcctcagacagttctttaaagctatgtcttaaaaaatagttttcaaaaatattttacaatatcaaatagtaatcacatataaaatacaatattcaaatatattttcaaaaagttaattgcagaaagtaagcttaattttgatatcctccattttagcttttcttgggaagtatcctttcattttgaaatttcatttcattttcaagaagtttctcattatccactaatagtaaacgaacatactcttgtataggaggcttaaaatactattctgatgttaaatatagtgtcaatttaatagaaactgagtatcaaagaaagtgttttttttaaagaaacaaaatttatttgtactttttctaaccttttgtttatatttcctgctcatgtttcacctctgttttattaaattatgtcacatatctgtgtacgtagagaaaccctaagtgaatatttatctagtttgatatttatttggtctcatttattttgctgtttttaactacttcccttttttgtaatagcccagtttcctaggagccttggagcataaatgagaaggggtctgcatagcactgccactgcacttagattttgttaccaggcacctcgtaacagcaacatttccatcactgtgtgtcatgaggataaatactttctgtaataaggattttctccctttatgaaaaatatagttgtattatgatttaccaaaagtatgcttccacattagctatttgtggatattttgtgcaatagttgaccatcattttcttggaatttattgtgccaaagtaacccgataataaatgttattgtaagtgatacattttatgatgtaagcaggtgcatagctatgctggtcctttttattttctatatttttctggttacagaccaattctcatggtgaaacagtgaaaaccttgtatctcagttaccttacagtccttcagaaggtagctaaccatgtcgcgctactgcaagctgctagtacttccaaacaacaggtttggttagcattttacatttctttgtgatgctattgttgtgaatattttataaagttttaaaatagttattaaataaagtttttgtggatgaaatttaagaggaaactgatttgcttatttttaaatgtagatatcaaggagtatgtgcacttaagtttttaatcaaagtgaacaaatttaagcttaatttaaaataagaactatcttttatgcctttaataatgttcatatctttatttttcaaaacagtctttggtataattactaaataacatatttgatgggtcagttctattcctctaataatgtctgtaatggtatttaatctactgggtaaaatgaggatttataataatttgtatattaaatattagggctgtttaccaaactggcaaaaatcagtaatttcaaagtttactttggttgtttccttttattctagagcacacataaatgaaaagatgtttttgtaatgattttatatttttttctgttatagttgatgccatttaaatgtaattttgaaatctcataagaatttgatattgttctttgatagtactctttactctttgggagtatttagcaccttgttttggaaatcttaaaaaattgaaaagtaatgatcaagttaataaccacatcattaagaattcagtgccatacgtttaacatataactttaagagtttttgaattcttagtctgacttagggaagcaaaaatctttaaagtaatacattctttctaaaaagaatttttttcataaattatttcaatttatacaggtttgaatgtgttaagtggaaatatcttttcttctgccttttcccttcaaggaaacacttatcaaaaggatatgtgatcaggtattttccagattcccagattttgtgcagaaaagcaaagatgcagcctttgaaacactttctgaccctaaatacagtggaaaaatgaaggtaagtgctcctctttcaggttgcatacagacatgatacacaaaatatttattcagtggtatgacagagacaccaactaatcagaacaggtgctcagtcattcagaagagatggtggctatggacaagtggtgcaattgtatcagcatttactaggtcactatgaaccccgaatacagatggtgtgcactcgataggtcctctgtagtagttgcttcaaatatacttcaaattttccttattgatatattggacttatgccctcttaaaatgcgtgtgctgttaccacatagataatagcttgtcttcagatgtttaaggaaataacctaccagaaatataaaagctaatgcaaaacaggggggtaaggaaaggccttaccttggaattagagaaaggaatttcttgaagagtttaagatgggcaaggtctgtatgtctagaattttctgcatgttgtttttacttgcagaactagatcgtaaagttgcaaatagtcatttgtcatacacaggaaaattgacctgtagctgtgctgctcttggtaatgtgttaccgagggaagggtgggaaaagtaaggctaagttctccaaccttgacccaggccttgggcattgcctgtggcagcagcatgaaatgctgacagcttcctgcctccttgcaacaacagagtttgtttaaccccttagtgtctatcaagaatctttatttgtagattcacagatttttacagaacaaaactcaactttgttatagtttttaaaaggtaagttctttttgacataaaaagaataaaaaggaagtagttcaaagcagtttttgttttttttttatagaaatacttttagcaattgatctagataagttcatcatggtttagtttgcttgggacctctaaaatcaatgaaataaaatagaaggtaggaatatacatacatacataaagactattgcattaaaaacttgcttttaaaaaataaatgtttatattaatgaggatatcatgtgatttattaccacaacaaataattcaaatctaatgatatttcctaaggtagcaaatttttgtcatccatttcattgactttaattatttttaaattaaaatatataaaaagtccggtttagaactgagcacttactatcccacagtttaaaccagtagaacatttccagaaattatagcctcctctgaaaactgcattagtcattgctactcatttaaattttattccctgtgactcttcactaaaaaattgccagtcttgaaattaagttttataactctgcattttatattttttatatattcattaatatatacttgtaaaatatacttttaaagttaatctccctaggaataatagtgtctgattaagagaatgattaaatttaattttattttaatttttaggagggaaaaggtaagcataaattgttgctggaggctgggtagtatttttatatgtgaatgatgcaggtaatttacttggtttgtgagagagcaccagccaaacagatggatagtaataagctagggatatatttttaggactatgttaaatcatttgactaacagcatcatctggtcatatattgatttggtaatgcagacttacaggcttatcatagaatcattgcctatgggtttaagaactctaagaattgagttgcatttaccttttgaattcaggtgataaaagatctttgtttagcttgtcttgtcacaggtcagcctgcaggtgcaaggactctgaacagaatgcctgctataatctttatagcctcaaagctacacttatgaccccacctctttctcttgagtgtcagagttttgacctcaactatcattcaaggggttagtcacaagttgcaatcattcacctgatgaaaatcttcacttttctttctcttgagaaatgccgcagagccacttactgtggagggtggaaaaaaagacaggaatccagcttggtgctgctgaagtcacacaagggtcatgttcatctttctaggcctgactgaccaagttgaggaaagttaagatccaaggttccttgctgttaacacccccaaataatacgattcctttataggtggattgtcttgttctgtggaggacaactgagtgataaaacattgggtctatattgttaagactccaacatctgttgattacattgtcattttggaaatttctgggatcttaatttatagtcgttcatttagttagtctctttaaactagcctaattaagatctccagtctaaaaacatttacttttcctgtgacttgtttttgtttttactgtaaaatacttgaaaacacttaaagttgcaatagttatgataccaccccaaataatgagaatggatttctatacaatatatccttggtttaaaatgttaatatcttaagaatgaaaaacaaaccacagactgggagaaaatattagcaaaacaataaaggactggtttacaaatatacaggtaactcttaaagctcaacaatgggaaagcaaacaatccaattgaaaaatgggcaaaggatctgaacaggtacttccccaaagaagataatagagatggcaaataagcatgtgaaaagatgctcaacaacatatgtcattaaagaattgcaaattaaaacagcaaggagataccactagatacctattagaacggccaaaatccagaacactgtcaagcccaaatgttggtgaggatgtggagtaacaagaacccccatctgctgctggtgggaatgcaaaatggtatagtcactttggaagacagttcagtggtttctcacaaagctcttaactaaaaaatattaccttaaatagtcttactatatgatcccgcaattgtgccccttggtatttacccaaatgagttataatgaattaaattttattgagttttaatgagttagaaacttacatcccgacaagaacctatgagtttatttataattgccaaagcttggaaacaactaagatgtccttcagtaggtaaatggattaaaaaagctgtggtacagccatactgtggagtactatttagcaataaaaagaaatgagctatcaagctaccaaaagacatggaagaaccttagatgcatattgctgagtgaaggaaaccagtctgaaaaggctacatactgtataattccaactatataatactatcaaaaggcaaaactatggagacagtaaaaagaacagtggttgctatgggttctgggggaggaaagaatgagtaggtgaagcacaaggaatttttagggcaatgaaacaattgtgtatgatactgtaatggtagatacatgtcatgatatatttgtcaaaacccgtgaactatgtaacacaatgaataaaccctaatgtaaattatggactttagctaataataatgtatcaatattcactcatcagttgttacaaataaaccacaccaatactaataatacttgatgttatattttctaataatattattaatacagatattaataagagaaagtgtggaggaggttggaagtagggaaagaggagttttgtgcattttctactcagttctgtaaaacagaaaaaataatatctaccaatttaaaaagtcttatgtgaaattcaaattacatacttcatatagaatcagttattttattaaaaaatgaactaaatgcaaataaaacttcatatgttctccaaatgtgaaagtaatgtttacccgatccataacatttttatttaccatttgataaataaatttggttatctgagtagaagttttttttaactccatagctttttttgagggactagggggaggtagaggtcaaagttagcacaatagcttctcttgattgagtaagtgttatattgagtattttttttatttaaaagcttaaatgtttatcattaaataaattgttttagtgtttgtttcatctttcagaagaatttagactttgtatagaaaatttctttttcccctctgtggattgcttttccacattgttctggagctgtcattgccagatgtggaaataaaagtaacagtgtgactgttatacacaaggctttggactgtttgtttcctccctgaaagcactgtgtgtgggggcagattactggcattttgaggtcaaaatcaaatctggaagtcagagcttactgtaaatagagaaacaaaggggagaaaatgagaagaggtgtgtatctgactgattattctaagaaaataaatatcaagacttttagaacctagatgtaattgaacacatttcattacatccatctagggacaatttaaatacttcctaaaaggaatgctgctctataatttagtttcttagcatattgtaggtataaagaaagtgtattttggaaattaaattaatccatttaaatgcatcccataatccaaaatgcttcctttttattaaaaccagatgagatgaaataaaagtctttgggaactttacctccttattgacaatatgatgatgaataacatttgatgtaatagctaatactttatttctctaacttggaaaaaatgaaaggaattagaaaaaatgaatgaggttagtattgtatgaaaataattttaaagaaattctcaagtgatgtttatatgtataaagtgtacttttagttggaactggttcactgattttctgtggttcattttcaggtccttcagcagcttttaaatcattgcaggaaaaacagagataaagttcttctcttttctttttccaccaaggtgagttcatctaaagtatatccttgattggccagcctcaacttttgaggcataaagaataaagcatatgcctacatgacaccttacagccacattttctcttatctacacagtaggaaatagtgaggtaagcaacttgaagtttttaaacagacactaaaatttcaattgtttcagggttgctaaatatcaaactcaaagatagatttttattttctgttgatgttcttaataattacaatgttctttaagacatttcatatattttagaacttaaaaaatagcatgcatatatttatgtaaatgatttgaccagtaatattgtttgtttcttaaaaatgaaaagattgatttttaaaacaagttctgaatgttaaagccataatgttgcaggataacgggaataaatatatgggtcagaagtgagaaaaatatttattgttcttggaattataagaaagaaattatgaacaccaataattaatacttaacaagtctcaactttgtaatggtctgaaacttacttaaccaagattcatgtttgcccatcttcatacctctcgtctagttgcttgacgtgctacagcagtactgtatggcgtctgggcttgattaccgacgacttgatggaagtacaaaatcagaggaaagactcaagattgtaaaagagttcaacagtacacaagatgttaacatttgccttgtctctacaatgtaagaaaattaaatttaataactagatttttatccaattgtttttgagatttagcataatttttaaaactattactggattaatttttaatggctatgcttatttagaagcagcaaaaatactattatgaccgaaatttcaatgtcttaagttttagctaagcttttctctcatttcctttatcaacattgaattcctcttagaagtctgggtttataaaggtaacaataaaaaaattgatacttcctcctatgaattttccatggtagtgttttgacccaagtctcctggtgagaataatcagacttcttattaactggataactgagactcactgtagcagcagttttcccactgtgtcagggagcccttgagagcccactggggctaggggctcacgtttccctcctctgcctctacctcatctcaactggagcagctctgcagttagagtttttatgaaaggtaaattggttctaacccctatgtatgaatatccctttaagaccttttagagaatatacacacttctgaaaagatttaaatcaacataaacacctaagtaagattaatcccattttaggaaggaacagatcaataacttttgacatcctgtgtaataagaattttatagattcactcccactgtctttcagaatttcaatggactttaaaaataaacatatataaaatgcacaaagtaaaaattaaatcagaatagaaattaacttaaaatgaggaataaaatatacttatgaatgagccaacattgttgagcactttaattattcttgaattcctaccactaaggcaaatggggaaaagctttggattcccattttcctataaaggaatgcaagaagtaatttttttcatgcgtccttacatacagagcactaaatgacatagaatactgtggtcaattaaatttcataaaacatataagcattctaactttaaagtgtttccagttgatagatgcactaaacaatggttccaataatagactctataatgacaagcagtagtctcttatccttcttctgctcacttccagctcatttgctgagatcctccataaagttcctaattaccccttcacctctatctgtcagaaactgctatttaacctatccattgaatttttaattttaatcatacttcgaaaaacatctttttggatggcatttttgctctattaactcctgtacttggtggtgctgatccttctatttgttgtttcctctggctcttgcttatggttgatagtttcttcatgtttggtcattttttttcttttgagcttatcttcaatgggatttttttcctctggaaatcctttggagaccggttgtaggagttttctgcttgtgtggttttgctttggcttctgctgggcatcctgacaagacaagggaaaaagttttggattcctatttttctgtgacaatttgagtaatttatttcataagtcattatataaggaaccttatgtaatataataaatacattcttcagctgtgttttgcaaaagacacataagctcagtttttgtttagtttctatcattttgcaagggtttatatttaatatgttgtgacagaaatgttttcacattggcttagccattatcttgccagagtacaaagtcttcattatcttttagtttatcaactttacataagttggaacttctcttaagaaagatgattaggctactttcactactctctccccgtttttttctcacaatgtttgctattttaaaattatttgtctataaactacttttgtaactttcaatctttgtacttctgcattagatccattgaattttctcttagatctttttcctggatcccgtgtcttcttctttcttggtttgccgccatgttttactggaaaatgattcaagttttgatgtttggtccattaactttccacatgccttctaagtctttgtaatgtgtggtattagcattagcacacacccacccacccttctacttttgtcacctatacatattatgttaactattttaacttttactttgtcaagggtattaatgttttcaataagccctgtaccagtaaccggttattgtccataggttggcattaaaatttgaaggcaaaaaagcgtttacattactgtgtttttataaactaaacatctttaatgcaggggcaagtagtgctaagataatttttcttaatgttcacgaccttttggtcaatgcaagatcagtcttaacatcaacctcatatgacttctctttcctaagacttcatccatgttttatgtttgcactgttcagttcacttcaaatttcaatcatgactttttcggtcttttccccctctcagtctgtttctgccctttgtaataatcctcaatgttactaattctcattcacacattctcttctgttgagtcctctgtatcctgaacctgcctcctgaaacttttattccttagtttcaatctggcccagttttctaggcctgataaagaactgtcatgttgaagctttctttcactgctcttctgtgttggatctttttcctgggttccatgctgtttttattcttgacttgcccctttgttttcctaggaaatatcctctggtaactttttaagccagaatatataggaagtaaattttctgcatctgtaaatacagaaaatgtcttttattgctctctcacttaattgatactttgtccaactatataattctaaattgaaaatcatttcctcttagatctttgaagggcttgcagcattgttttctgatagatggtgtggctaaatagatgtgcagtgccaatctgattttcattcctttttgggaactcgtaagagtttttcttcatctacactattctaaaatttcacggtgatatttgagtcttggtgtggatcttcgttcatttttttgtgctgggtacagtaggcttgtattctgaaggcttatgttctttttcaactctggaaaatgcttttttattatttctttaacaatggccttttttttttcttcctttttctctgctccctccctctggcatgccaggtcatcagactttcaaactttcaaactatattggttctttaaatctctgaacttttctctcagactttgtctttttgctctgttctgagaaatgtcatttttcgatcttattattttgtttgaaatgatcacttttttttttttttaagacagtgtctcactctgtggcccaggctgtatggtgcaatcttggctcactgcaacctccgcctcccggatttcaagcaattctcctgcctcagcctcccgagcagctgggactacaggcctgtgccaccccacccagctaatttttgtgtttttagtagagacaggatttcaccatattatccaggctggtcttgaactcctgacctcgtgatctacctgcctcgccctcccacagtgctgggattataggtgtgagccaccatttccgccatcacatttttaatctaaagtttttcttgctttctgacctcttttgtttttggagttaccttttgttttagaacatcagtgtgttaaactctagctttttatagtcatttcattcagtttatttaaagaatgatcatctggcatttttcctggggtttgttttttgtttttggagaatcaatgaatttattaatgagtttgaggaaaattggagtttttaaggtatgaagccaccctatccataaacatggtatctctttatatttatttaggttttcttagaagcattgttcaaatggatacttcgtttgaccttttataatacttaatacataataataaaacttatttcatcaaagacatgtttgtagaacattaagatgtagttaaggtgtactttctgatatacttatttgatacaggaagagcatgtggcagacctaaggaataaacagcctgcatactcattaagtgtctcaaataccagtcctcagttcgaaaagagcaatattaaaattttttttgcttaacaagtaaccctttgctgttaaccatgtaagaacagagtgacaagttttaaagtttaggtttctgagttgtattatcatcaaagggagaattatctcatctgcagagagagagagagtctagggcctttttcttcttctttaaagggagctttgcttcttcagcaaggactgaagttattacttcagaatctcttggaagattgctacctcaactagtagagatcttatctgtggctcatatatggcatctgagatggcatcatacatggttatgcctgaccttgccatcaagaaggtaactggaacagttgattagatttattcaacatagaaacctttaacttcttttctgcttttttgctgtctaaattccacccaatcccctaacttatccatttttttaatcctttctaatactttctccctatcccacctcattcttttcttagagttcagtcaagtctctatgacatcttcatggtatgtctaataagcagttttccaaaggagaaaattcagtttctactgagcactgaactttcaatcaggacatttgggtttgaatcgagacacttgctacttaggagaccttgaacaaattaatttttgtgattgtcaattttctcgcctgaaaaatcaggatattttgcttatagaagtcttcagaacaggccaggtgcagtggctcacgcgtgtattcccagcactttggaaggccaaaacggatggatcacctgaggtcaggagttcgagaccagcctggctgacatggtgaaaccccatctctactaaaaatacagaattagccaggtgcagcggttcatgcctgtagtcccagctactcaggaggctgagacgggagaattgtttgaacccaggaggtggaggctgcagtaagctgagatgacgccactgcactccatcctggacaagacagagcaagactctgtctcaaaaaaaaaaaaaaaagaagtcttgagagcaaaagaactagcatatatgaaaataccttgcatagttcctgatatatagtagatgctcaataaaggttaatttatttgcatttttgatagaaattgtaggagaaaagattatcatttttcttcccctggatgattagcatccagtgtaaagcattatctaagtgtgagttgttttgtgatacagtgtaggcagctgatgagggaaaatggcaatgcaaagcctcagaggaaagcctgaaagacagctgggctcaggaaaacagttgaggaagagaaagaaaatcattgtgttcttggattttggttttgccttttctttgtaaaaatgtaaaaatttatcatcgttgtcttacagagtattaaatacaggatatgtagatcagatagttcaaaacatgaaaagatcacaattattgttatttaaaatctattaaattatataggcagctggaatcttcaactcagtatacaaacattatatacattcagttttgccaaaagtttcctttagaaattttattccaaaagaaataagtagtatgctgatagaaaaaaatgaatctagcaaaaccaatatgtgatttttatactaataataaaaactgccaaaaaatatgtctttagtgacttctcttcactgttaccttaaccacaggtcaagttaaatgaagacaaaacttttggcttccatttaagtgtcaaaaagactctgtagcatgaatactaggcacaacttcattcttggttttgactttcagaatcatacactagttgactacaaacagctttctaagcaaaccctataatttgaaatacaatgctttattcatacttactaacttgtgaggattaagttaaggatttggggtaccatactgcaaaagtaaaattttccagatgatataagtacctctaggtagtccaacaccaggaatcatgagctttgaaaggatcaggagaaacatcattttctgtctctcataacattattccaaaacactgtcaactttcccagaaagatgaggacatttcttttgttatgtaccccaagagaaagacattctaaaccactcttttcaaataaataatgagaatcatattatatgccttttgttaaaatctgcctttactgctttattttgtctcagtctcacacctttttgttcaactactaatatcttcatggacccttaatgtgcagcaagaaaaataagagaatttttgcctttgaagagcagtataatgcaataaatgctttactggagtttatgtgtgaagattcataggcatttaagaaatagatagatcaaaaaatcccatagaaggatggtgatgttttaactggttctttagagataagattttattaaaaagaaaaggaaaagcaggttttggtaaagggcattttaggcacagagaatagcataggtaccaaaataactagagaacttatgtgtttagtgcttaggatatgtggaggcaacagcttgggtgtatgactacataggagaactcatgagttattttaacgaagctcagtttaacagagtgtaagtatccactctgtgacaggccctggaggagacacgtctcttaaagtttataactcaaaaagtagaggggtacaggaggagttgttcagaaacatgtaaaaggatagttcaatacagtatggcgaatgcagggtaggaggaggcacagaggagaaagatttagttcaggctttgttaatgacacctgaaggacaaggaaaagttagccaggcaaataagatagcagagaaaattgtatgaaagcaactttaaatgttttggtcacttgtggtatagttatcaagaatgactggtgtgataccagctgcagagacggtaggcctggtcattgaggccgattggtctctgatgaataggaattaatgggttttaagctacaaacagctttctaagcaagccctgtaatttgaactacaatgctttcatacttactaacttgtaaggattaagttaacgatttggggtactatactgcaaaagtaaaattttccagatgagtagtacacttagttctgtatattctgtgcttaaaataatttttatgtaatgtgagaatgggcatgggtgtaaggtctgaagtaagagaggacaatcagaagaccaaagaagtaatacatgcaagtgcaatctaataacagctctgaaaagggcagtggtaataggaatggagaagggactcaagagaaaaacatttctgagctaaatatgacaggacttgatactggttagcttttagtgggaaagggaagtagtcatggagaagaagaagtctatagtgatacttagcatggcttttgactttgatgagtgagtatatgggtggtatcaccaggaaatatatggagaaaaagaactctgggtccagggaagtattagatgtagctcattataaaattagcattgatgttatttcatcttgttctcttccttttggagagagaacatgtggcatcctgttgcagtgtaactcttggctctctctgtattcactatgacaagcctgaagcatatgcggtagcaccctgactgcctgtcttgtgatcaacatgtgatggtggaaataatctgtacttaagaatccattctgtgttaaggctatatggatgttagccacatttttaaattaaactttttattctgagatatttctagattcacaagtagttttaagaaataatacagaatgatcccatgcactctttacccagttcccccaatgtaatatcttgtaaaactgtagtacattatcacaaccaggatactgacgttgatacagtgaagagcagaacatttccatcacaagaatccctcatgctgtccttttgtagtcacatctgctttcctctctcccctttctccctgagccctggaaaccactaatctgttctccatttctgtaatttagaacaacataatcaagaatgttatgtaaagggagtcataaagtatgtaaccttttgggattggctattttcactcagcgtaattccctgtaaattcatccagttgttgtatgtatcaatggttcttttctttttattgctcttagtattcatgatatggatacaccacagtttgtttatacattcatctgttgaagggcatctgggttgtttccagttttcggctgtgacagataaagctattaacatttgtgtacagacttttgtttgaacattagttttcattcctctgggataaatgctaaatattgcaactgctgcattatgtgatagttgcgtatttcgttttataagaaattgctaaactgttaacaaagtggctatatggttttacattccccacagcagtgtgtgagtgatcaggttcctctgcattttcactaacatttgctatcgtcactatttttttcattttagccattctgatgggcatgtagagacatgtcattgtggtttggatttgcatttacctaatgtctaatgatattaaacatcttttcatgtgcttcttgtataaagctggtgttaatgcttctgtaaatggtaaaattctccagtgaaatcatctgggcctggaggggttattttttttccctaagagttttgaaaataacatactcaatttctttaatagttataggactattcaggttgtctgtttcatttagttgagttcagtggtttgcggtttttgaggaattgtttctcttctaacttattgaatttatgaccataaaattttttatagtattcatttatccttttaatagctgtaggatctgtggtgatatcccttgtttcatttctaatattggtaatttgtgtattctcttttatctttgtcattgctagtttagcaacgaatcagctttttttcactgatttttctctgttatttttctgtgttcagttttattgattctgcttttttatttattatttcctttcttctgcttgctttttttgcttctttttctagtttcttagggggaggacctcagattattggtttgagacctttaatttttttctaatataagcatttaatgttacaaattttcctaagccctgcttagctgcatcctacatattttgatatgttgtattttcatttgtgttacattattatttatttctccttgtattttttttcacagtttttttggatttcagattttgtttgactcatgagctatttagatgtatgttgtttaatttccaagtgtttggaattttttttgttgtcctcctgaaatgtattgctagtttgactccattatcgttagagaacatactcagtataataccattatattcagtatataccagtatagtttcagttcttttaaatttgttgaggtttgttttatggcccaggatttggtctatcttggtgaatattctataggaaccaggaaaaaaaagtgtgtgtggtgctgttctaggtggagtgttctgcgtatgtcattggttggtcattttgttcttttatatccttgccaattttctctctaggagttctatcagttgctgaatgtgggatattgaaatcctcaactataattgtgcatttgcctgtttctcttttcagcttaatttgacttcatgtatctttcagctctgctgttttggtgctgtttggtgttttggcagattgatctttttgtcattgtgcattgtccctcttttaactattaactttctttgctctgacatatacttggactaatattaatatagccagtcttgcttttttctttaataattgcctggtatatcttttatcatcctttcactctcagcctagctttgtcatcatatttaaagtgttttgttttgttttttgtggagagcatattgttttttcaaactaccctgccaatcttacgattttaaatggtatatttaggccattatattgaaggtaattattgatattttttatttaacttttatctttttatctcctatttctagttccactgtttctcttattcagacatttctttaggattctgtatttgtttatgtatagtgttttttagtgtattgctttgtgtagcttcctggtggttgctctgggtatttacattgtacatagtaacttctcacagtctactggtatacaggtttaccagtttgaatgaagtatagaaattttacttacatttaagcttcttttcctactccacttttaagatattattgtcttagatatttcctctacatgccctaagcagcatatcagattgtattgcagttttcctttaaccatgaaatgtgatttatgaaatgcatgagaaataaaatagtatttatattcacccctattttaacctattctgatcttcctctttcctttctgttctagttccaagccttattctgctttttttttttttccttatgaactttctagccaccaatcttttaggttaagtctgctggtaacaggtgctcttagttttcgttagtctgagaatgtcttatctcctttccctttctgaaggatattttcactgagtatagaattctgggttgacagttcttttctttcagcacttgaaagataatgccactttcttctgatatccatggtttctgatgtttctctctgttgttcacatttcgtgaatgatactggttctcatcatgcttactgattctgtcttttgtcttttccactgtactgttcagcccatttggcaagttttgtatttcagctatttttccattccaaaatttttattttgctctttatatccatttttgttttgtttgtttttgctgagactcaatttttttgtttgtttcaagcatgtttgtaattgcttgttgaaacatttttatgatggctttgttaaaattcttgtcaggtaattccaacatctgattcatctcagtcttttcttattcaggctgcaattttcctggttcttggtataagtgattttttattgtatcattgtgtcttggacattttgagtattgtgttatgagactctgcatgtgatttaaatcttccattttagtacacctcctctttgacaccatgccagccaagtaggggtggaaagctaggttctgtctttggcctctgctgatagcctgagagggaagtgctttactactgctcccacctggcgtcccctgacaccatggagggagaccctgttatcattgggaagaaaacgaaagctctagctcttcactcagtcttctctgacaccaccccagcaagaatcagtggtagtgtctcattatagccaggcaagggtagaagtctagcatcctcattcagcctttgctgactaaggtagggatggggctgcagattgttccttggtgtttggcaggagtagagtggttattgtgtcacatttttctgcctttcaaggctacacctttcctggttctttggctaaagggaaaaggcttttcttgggatatatatatatatttttatagtctgtgactttcggcattaccaacagcttgggatatgttaagaacccagcttgtggtatcttaagcaaaaaagaaagctagactttcttctcacagtttttttggatttcagattttgtgtgactcatgagctatttaagtgtatgttgtttagtttccaagtgtgtggaatttattttgttgtcctcctgaaatgtattgctagtttgattccgttattgttagagaacatactcagtataataccattatactcagtatataccagtataatttcagttcttttaaatttgttgaggtttgttttatggcccatgatttggtctatcttggtgaatgttctataggaaccaggaaaaaaaaagtgtgtgtgttgtgctgttctaggtggtgtgttctgtgtatgtcatttaaatcctgttggttggtcagtttgttcttttatatccttgccaattttctctccaggagttccatcagttgctgaatgtgggactccttcagctaggctttcttttttggaaaagccatggaagctttcttttttggaaaagccattcctttttttcaggaaagccatgactcactgccatgccattccttaggccttgtagtccctagcctgcctatcttctctgtacctttcagagttttacgtttatttcctatgtaatatccagagttttagctgcacttagtggaagaataagatgtgcatctattcctgaattgagttttttaatgtatgcattactttatttagctagaatgtactaacactttttaaaaattatattaggaaaatcttgcagaagtagtatttgagtatcaaaaaaaagtaaaaaccagcacaaactatttacgtgggctctaatgaccagttttttagggattttctagagtggtagaaataaaattgtgccttaaatatttaatttgtggcatatttgtattttaatcaccaccttactttgatgaaattaatgcaatatcgtactgttttggctatagaaacctggcacagttgagttatagcacaacagttagtttttgctgttctaatgtgctttttttttttctctttcctccagggctggtggactaggcctcaattttgtcggtgccaatgttgttgtattatttgatcctacttggaatccagccaatgatcttcaagccattgacaggtataatactgacaaaatttaaagtgatctgcaaatacttttaatctaaaaatactcttgaacttttaaggttgcttatactatgactatgattagaagaaagggggaaactggtaaaaacgtacatttaatataatcctgaccttctcaatccaaataacagtccaaaaatagccatttttcatccatctcagaatcctattaatatgacagaaatgacttaagaagaaagaataaattcctaatactgtaggaaaataggatagttctgtactagtagatcagaagttttgagaaactcctggaagatagaaagcaagtagaatctgtgatcagggtatccgcagagaaatactacaatccaaagtctgcaggaaagagtacagaaattttaagcatgggcttgcaactacagtatgtgggagtagacagagtgcatcattctgggaaattgataatgtcctgactctaatacaaattcccctctgacaccctactttacagagagattggccgtaacaggtactctttgattaaagctgaaagaataattttacacattttataaacaaatggggaatctgactgtagaaagcttcctagaatggatgttggaaccagatcataaagccagagccaagcctgaagtacttccagatctccccaggacatgaaaaagggaaatacacgtgttacctgcatggaaacacagaccggctttccagtgatgcacctagtcgtcattttaattatgaatgggaaatgaagaattatgaaacattttaataaaattaacctagcaagaaagcaaaggacaaaggtgaaaaacagacattgaagggaataaaataagaataggatgccaaggaaaaaagtacataaaaaaacaaattagttcttataaattaaaactattgccaaaataaagtgactcagtagaaggtctgggaaaaaaaatggagagggctaatggaaggatatggaaaaaaatgaaggtctgaaaaaaaatggagagggctaatggaaaaatggagaaggatatggaagataaaaggaatgaatattttaaaacataaagtcaagtagcaaatagatgtgaaatatgagtaaagagaaattgaggaaaaatcccagaaatcatcatctgtgtattccagaaataatgaacagagactggaggacgggagataattgatgacatgattggagaaaattgttattaattttgaaggggcatttagtatgaagtaggaataatgactgagagagaaaacatacatgttagtaatatttctaagtttcaaagataaagagaagggctaaaaggttccaaagtgagaaacagggagagaatgatttataaaaactgcaacaaaaaggaaaagatacattgttaacaaagaaatgagaatcagactcaattcagcagatcagactttgaagaacatacatttcatcagcattataggattctagaatgacaacagaattgtcaaagtgaaaaaatttatatggctatatgtgaaagaaaattattttgagttgtatttacaatttgtggctaaaattttaagtctaaaaaattactgggagtgtggctgataggcttcatgcagttgtaaagaaagaattccctgaaatatgaagggatggtatgaaaaaattagtaacaagaactaaaatgttatataaattttgataattgtcagaataagggtagaggtgggtaaagttgtcttagaattgtttttttttcctcaggaaaggaccaggataccctggtcagttctcaaattgtatgccaacaaatgtttttaaatgctagcaaaaaatttaggggcaacaactaaaagagtgagttataataattacctggtacaattttcaaaaacacagatgctcaaactccaccctgcaggcattctgtttatgtagatgtagaatgggactcaacattctacgttttaaaaaacacccaggttgtggatcaaaggacactatcaacagagaaaaaaggcagtctacagaatgggagaaaatattttcaaatcacatatctgataaagtattaatatctagaatataaaaagaactcctaaaactcaacaacaacaaaaaacacaacccaatctaacaatgcataggacatttctccaaagaaggtatacaagatatataagtggccattaagcacatgaagagatgctcagcatcactaatcattagggaaatgcatatcggaactatagtgaggtacaacttcacacacgttggatgactattgtaaaaataaaagcaacaacagaaaacaagtcctagttgaggatatggagaaattagaacccagaacccttgtgcattgttgatggaaatgtcaagtggcacagctgctgtggaaaacagcatggtggttcctcaaaaaattaaacataaaattaccatgttatccagcaattacacttccactttgggtatataccaaaaagaattgaaagcagagacttgaagagatacttgtacactcatgttcatagcacctgtattcacaatagctaaaatgtggaagcaactcaaatgtccatcgatggatgaatggataaacaaaatacagtttatacataaaatggaatactattcagccttaaaaagaaatgaaattctgataaatgctacaacatagacaaaccttgaagacattatactacatgaaataagccagatatgaaaggacaaatattgtatgattctacttatatgaaatacctggaatagtcaaatccatagagatagaaagtagaatggtgcttattaggggatagggaggaatggggaattattgtgtaatgggcatggaatttcagtttaggataataaaaaagttgtagcaatggatagtggtgatggctggaaaactgaatttacttaatcccgttgcactgtactcttaaaaatagctaaaatggtaaatcgttttgtatgttttgccacaattaattttaaaagccacccacagtgattatgatacaattggttctcaactccactttgaaaaacactggatattaggtgtatcggggaaattcagccagatatcgggtgaaattcacccccaatattttacataggtttttttctattttccctaagtgtcggccggtctgagaaataaagagacagtacaaaagagagaaattttaaagctgggtgtctgggggagacatcacatgtcggcaggttccgtgatgccccctgagctgcaaaaccagcaagtttttattagcgattttcaaaaggggagggagtgtacgaatagggtgtgggtcacagagatcacatccttcacaaggtaataagatatcacaaggcaaatggaggcagggcgagatcacaggaccacaggaccggggcgaaattaaaattgctattgaagtttcgggcatgcattgtcattcataacatcttatcaggagacagggtttgagagcagacaactggtctgaccaaaatttattaggtgggaatttcctcgtcctaataagcctgggagcactacaggagactggggcttatttcatccctacagtagtgaccataaaagacggccgcacctgaagcggccatttcagaggcctaccctcagggatgcattctctttctcagggatgttccttgctgagaaaaagaattcagcgatatttctcccatttgcttttgaaagaagagaaatatggctctgttccacccggctcactggcagtcagagtttaaggttatctctcctgttccctgaactttgctgttatcctgttcttttttcaaggtgcccagatttcatattgtttaaacacacatgctgtacaaacaatttgtgcagttaacgcaatcatcacagggtcctgaggcaacactcatcctcctcagcttatgaagatgatgggattaagagattaaagtaaaacaggcataggaaatcacaagggtattgactggggaagtgataagtgtccatgaaatcttcacaatttatgttcagagattgaagtaaagacaggcgtaagaaattataaaagtgttaatttggggaactaataaatgtccatgaaatcttcacaatttatgttcttctgccatggcttcagccagtccctccgttcagggtccctgacttcccgcaacaggtgtaaaacttccaaaagaaataagagtaccaagaaaatgtaattattttagtacatgataggaaatacatagttgtgttgggaagatggaggaaactcagaaagcatgaccaatgaagtgtcagaactaaatccaaacataaatatgaatatgttgaaactttttttagaaagaaggagaaaagtggggctggcagaaaggaaaaattagactcaggtttatgcttattatgaaacatatatgtaaataaaaaagacacaggaagttgaaaataagataaaaaaatcaaatcagggagatggtaacaaaaattaagaatggatggcaatgctaatatcaaattattaatagaattcaagacaaaaggcattaagcaaaacaaagagggccacagtccactaggaagttgtaatagtcactacataacaaagccaaaactcttatatatgatgagaaacagacaaatccacaactataatgggaaactccatattcctctcttaaaaaataataaattggccgggtgcagtggctcacacctgtaatcccagcactttgggaggccaacgtgggcggatcacgaggtcaggtgatcgagaccatcctggctaacacggtgaaaccccgtctctagtaaaaatatcaaaaattagccaagcgtgatggcaggcgcttgtagtcccagctacttgggaggctgaggcaggagaatggcgtgaacctgggaggcggaacttgcagtgagctgagattgggccactgcattccagcctgggtgacagagcgagactccatctcaaaaaaataaaattaaataataataataaatccactaggctaaataaatatataaattacttgaataaaagttatctaccataatttaataattgtgtatacagatacatctcattttattgcacttcactttattgtgcttcacagataattgccttgtttacaaattgaaggtttgtagagatgttgagtcaagcaagtcttccagcaccatttttccgtggcatatgctcacttgtgtctctgtgagaatgtagttctcacattatttcagattttcattatcacatctgtgatggtgatctgtgatcactgatctttgaagttactattgtatttgtttcaggacaccatgaaccatgcccctataaaaagatgaacttaattggtagatgtgtgtgttctgactgctctgcttactggccattcccctgtctcattccctcccttgggcctccctcttccctgagacacagtatttaaattaggccaattagtaactctgcagtggcctttaagtggtcaagtgaaaggaagagttgcatgtctctcactttacatcgaaagctaaaaatgattaagcttagtgaggagggcatgttgaaagccaagatgggccaaaagctagcagttggccaagttgtgaatgcaaaggaaaagttcttgaaggaaattaaaagtgctactccagtgaacacatgaatgacaagagcaccaaacagccttattgctgatacgaagaaagttttagtggtctggatcaaagatcaaaccagccacagcattccattaaaccacagcctaatccagagcaagtctctaacacacttcagttctttgaaggcagagagacacaaggaagtagcagaagaaaagtttgaagctgcagggattggttcatgatgtttaaggaaagcagccacctccataacaaaaaagtgcaaggtgaagcagcaagtgttgatgtagaaaagctgcagcaagttatccagaagatctagctaagatcattgttgaaggtacctacattaaacaacagactttcaatgagaacaaaacaaccttatattggaagaagatgtcattgaggactgtagtcaataaagaggagagttaatacctggcttcaaaagataggctgactctcttgttagagactaatggagctggtgactttaagttaaagccagtgctcatttaccattccgaaaatcttagggcctttaaaagttatgctaactctactctgcctgtgctttgtaaaatggaacaacaaagcctggataacagcatatctctttacaggatggtttactgaatattttaatcccactgttgagacctactgctcagaaaaaaaaagatttctttccaaatattaactgcttactgacaatgcccctagtcacccaagtgttctgatggagatatacaaggagattaatgttgtttatgcagtaacacaacatccattctgtagcccatggatcaagttgtacttttgactttgaactcttaatatttaagaaacacattttgtaaggctatagctgtcatatatagtgatttctctgatggatctggtcaaagtctgttaaaaaccttctggaaaggattcactattctagataccatttaagaacatttgtgattcatgagaagaggtcaaaatatcaaacaggagtttggaataagttgattccaaccctcatggatgactttgaggagttcgactttagtagaggaagtaattccagatgtggtggaaatagagaactagaattagaaacaaagcctgatgatgtgactaaattgttgcaatctcatgataaaactttaatgaggtcaggcacagtggctcatgcctgtaatcccaacattttgggaggccagggcgggtagatcacttgaggtcaggagtttgagaccagcctggccaacatggtcaaaccccatctctactaaaattactaaaattagccaggtgtggtggcgtgtgcctgtggtcccagctactcaggaggctgagaatcgtttgaacccgggaggtggaggctgcagttagccaagatggcagcatacccaggcaggatgtatacccagaaatgacctgagaagacttttagccttcaccccatgttgttcccaaggctcaagacacaccctgctaattagtgaaggtcttccttaccagtttgcaaagacttggggagttggctgtctttccaaatggtagttttcaagaaaagaccacaagacattagaaaaaaaaaaaagaaaagaaaagaaaagaaagaaaatgaaaatacagctcattcagagtaacaaaataaatctctagaaactaactgtccctgaagcaaaacaggcattggagctactagacaaagactttacaacaagtgtcttaaatactccaagagtgaaagtaaaacacagagaaagaactagtgaggaaaaggatatatgagcaagatgagagtatcaacaaagagatagaaattaaaaaaagaaaaaaagagagagaaccaaacaaattctggacacgaaattcaattttggaattgaaaaattcactagaggagttcaacagcagaccaaaatagggagaaaaaatctgcaaacttgaagataggttatttaaaattatttaatctgaggagcaaaacaaaaaggggaagtgaacatataggacactatcaaatggacccaatatgtacgttatggaggcccagaagaaagggaaaaggacaaaagggtagattaagaaataatgaaaagctctccaaatttgagggaaaatatggatatacaaatacaagaagatcaaccaagtccagatagtataaacccagtgagatccacactgtggcacattataatcaaactgtccacaaagagagcatcttgaaagcagcaagagaaaagcaacatgtcatgtacaaggaatttccattaagattatcaagtggatttgtcagtagaaactttgcaatccagaaggcagtgggataatatatttaatgtattgggggaaaaaaaaacaaacaaactgtcaactgagaaacaaagaaaaagtgtttaccgagaattttatgttgggcaaaactgcccttcaaaaatgagggttaagatatttgcagacagacaaaagcttgagggagttcattaccactagaccagccctgtaaggaatcctatccctggtgcagtggctcacgcctgtaatcccagcactttgggaggccaagatgggtggatcatgaggtcaggagttcaagaccagtctggtcaagatggtgaaaccccgtctctactaaaaatacaaaaattagccaggcatggtggcaggcgcctataatcccagctacttgggaggctgaggcagagaattgcttgaacctgggagacggagcttgcagtgagccgagatgccgagattgtgccactacactccagcctgggagacagggtgagactccgtctcaaaaaaaaaaaaaaaaatcctaaagggagaacttcaagatgaaatgaaagtacactagacagtaactcaaagtcatacaaaaagataaagatctccagttaaggtaagtatcatggacaaatataaataccagtatcgtaattttggcttataactctgcttttttattttctacaggatttaaaagacacatgcataaaataattataaatctatgttgacaagtacattgatatcaatgtaaaatcaattgatttaaggttgttataactttaggatattatatgtaatccctgtggtaaccacaacaaaaatatctaaagtatatgtaaaaggaaatgagaaaggaataaaaatatgtcactaaaaaacatcaattaaacacaaaggaaggcagtaatggaggaatttaggggcaaaatagttataagacatatagaaaataaataaagtgggaaaaatgagttcttccctgttcttaattatttcaaatgtaaatggatcaaattccataattaaaagatgtagattggcagaacagatttaaaaaacagtgtccaaatatatgctatccataagagactcactttaggtccaagaatatacacaggttgaaaataaaagcatggaaaaagatatttcatgcaaatagtaaccaaaagagaacaggaatggttgtattaatgttagacaaaatagacttcaagtcgacaactgttagaagaaagacattatctgatggtaaaaagtggattcaccaagatttaacaattatatacataaattcaacaaacaatagagccccaaattgtatgaagcaaacattgacagaattgaagggagaaatagctctgcaataataatgggagacttcaacacctgactttcataataggtaaaacattcagacagaagatcaataagtaaggagaggatttgaacagcaatatagacaaattggacctaacagatatatagaattttccttccaacgacagcagaatacatacttttcttaagtacacaatgaacactctccaggataaatcatgtgttaggccacaaaacaagtttttaatacattttaaaagattgaaatcattcatttttttccagtcacagtacaatgaaactagaaatcaacagcggaagaaaaattgaaaaattcacaaatatgtagaagttaaacaacacacacttaacaaaagggttgaagaagaattcacaagggaagttagaaaatagcttgaaacaaatgaaaacacacaccacaacttacaggatgcagcaaaagtaatgctaagagggaaatttatagctgtaaatgcttacattaaaaaagaataaaggtctaaatcaacaattaactttccaccttaaggagctaggaaaaggaaaaacccccagagctagccagaggaaggaaataacaaatattagaacagagataagtaaaacaaagaatagaaaaacgacagaggcaatcaatgaaaccaggagttggttgtttgaaaagatcaagaaaatggtggataaatctttagctagattgactaagagaaagaagactcaaataattaacatcaaaaatgaaaggggacattgctactgattttacagaaataaaaaggagttcaagagagtactgtgaacatttgtataccaacaaattgaatagtctacgtgaaatggatgaattgctagaaatacacaacctaggaagaatgtcatgaagacatagaaacctgaatataactataactgtgtaaggagattgaatcagtaatcaaaaacctcccaataaagtaaagcccaggaccttaaggctttgctgattaattctaccaagcatttaaagaatttgcaccaatccagccaggcacggtggctcacacctgtaatcccagcattttaggaggtcaaggcaggcggatcacgagttcaggagttcaagaccatcctggccaacacactgaaaccccgtctctactaaaaatacaaaaattagctgggcgtggtggcgtgtgcctgtaatcccagctactcgggaggctgaggcaggagaatagcttaaacgagggagttggaggttgcagtgagccgagatcaagccattgcactccagcctggcaacagagtgagactccatcttaaaaaaaaaaaaaaaaaaaagaatttgcaccaatccttctcaaatgcttccaaaaaactgaagaggaagaaacacattccaattaattctataaagccagcattaccccaataccaaaatcaaagactctacaagaaagaaaactacagaccaataatctttatgaatgttaatgcaaaaatactcagtaaaatgccagcaaactgaatttcagcagcatattgaaaggatgatacacagagtaggatttattcctggaattcaaaaacagttcaacatcccacaaaaatcagtgtaatatgccacattaacgaatgaaggaaaaaagacacataatcatttcattgatgcagaaaaagcatttgacaaaattcaacatctttttaaagatgacaaaaacaacacattaaaaataaaaggaaacaagccaggcacgttggctcgtgcctcttgaggtcaggagttcaaggcctgcctgaccaacatggtgaaaccacatctctacaaaaaaaaatataaaaattagccagcatggtggtacatgcctgtagttccagctgcttgcttgggtggccaaggcacgagaatcacttaagcctgggagacggaggttgcagtttgctgagattgcaacactgtgctccagcctgggcaacagagtgactccgtctcaataaaaaaaaaaaaaggaaactacttcaacatataaggtcatttatgaaaaacccagagctaacatcgtactcagtggtgtcatgattgaattgtttttcctgtaatatcagctacgaagaatggatacctgtttttgccagaaaaggacaaagattgtatgatttcatgttgtacctagagtcatcaaattcacaaagacagaaaagagaatggtagttgctagtagctgggggactggagaatggggagttattgtttaatgagtacagagtttcagtttggaaagtgcctgtagctatataggtgttatagttgcataacagtgtggatatacctaatgccacttaactgtacacttaaaaatgcttaaaatgattaaattttttgttttgtatattttgccacaataagaggaaatcaagagagaaaaatttgctatttagaaacaacaatgaggccggttgtggtggctcacgcctgtaatcccagcactttgggaggccgaggcgggcggatcatgagatcaggaggtcaagaccatcctagctaacacggtgaaaccctgtctctactaaaaatacaaaaaattagctgggcgtggtggtgggcacctgtagtcccagctacttgggaggctgaggcaggagaatggtgtgaaccaggaggcggagcttgcagtgagcctagattgagccattgcactccagcctgggagacagagtgagactctgtctcaaaaaaaaaaaaaaacaatgaaattactgtggatcaatatttaaattctggtgctaatttcaatttttaaattcatttattaaaaaagaaaggccaaaagtaaaagaataatttagaaaactagaaaaggaacaaagtaaagaaaatagaattatacacattattacattattaagataaaaataagaacataatataaattgtaactaattcattgaaaagaataaaatagagacacttttgaaaagtctaatctgagggaaaaagtcaaatacatagaaacacttaagcagaaaggccatctaaccaataacaatgtttatttataatacttaatattttgtgtacaattttattcaagtacatttggaagaataaggacaaaggaataatggctgcacttattgagtgtttatggtaaggtaggaactgtcattcttggtgctttccatggattatctcatttaatactcagaatatccatatgtgataggcactattatacccattttacatatgagaaagctgaggcacagtgcacttaagtaacttgctcaaggtcatagccaataagtggcagggtcaggatctgaatccatgtggtcttactgcaaagcttacacttttaatcagcctctctccacagacagctgtcaaggaaattggtcaaaatgaaaaccacagaaaaatttcccccttttttttgatcttgttgtattttgtactttttcattaggtcatcgagacatattatttatcccagtattcttccaagcacagtgtactgtgctttggtattcactgaaagttagttcacaataaaactgaataaatggcattccttttcctctccctgtccttccactgactctgacagccggaactgagaacagaaataaagctaatgacctacctatcgtataacagttcctcaacacttgtctccacttggtgaaaactcatcacttacaaatccttgctttatggatcaagaaatgatgaagtataggcgcacagtaacaagtgtctaaaatttttgtctgtaaagattaaaggatgtgcatcctaatggaatctctcccattcaccaaacaactggcttaagcatacatccaaaggacattttcttagatccatttctggttttctttagaacccaaacacattgtaggagagaaagggatgctgagcccctctcctctgctcctgggttgcagaatggaagtgagaatgcagtaccttacccctggtggtgctgtgtcacaggagcctccatttcctgctggagatgtgagatttgcaggatccaagatgtcctcgagtaaaagtccattgtgaggagggacaggtaaaggaggcagagagaacatcaaatgtaacatatgggtgaccttataagttcaaagataaatttcccccaaattgtgacattttcaagcatataggcagtatggccttgccccggttcccctcagcaactgtaacaggcattgggtgctcatacagagcatcctataaagcctccatatgagagaagctgtggggaatagacctatagttaaaccactgtgatgaatcagtttagaattttaattagcactatggtctgtatggaaacaccttggatgccagtaaactgagtgattcagtcagatccacctcatctacggatgagaactgtagaccagcacttcatagactttacagttgattaattactttttgctaagttgtggttttttttactttttaacagttttaataaagtataattgacatgcaataaactgtacatacttcaagtatacaattgataagttttgacttatgtacatgtaaaaccatcaccacaattaacataataaacatacccatcatcccagaattttccttctgcccctttgtgacccacctctcccattcttccccatccccttatccccaagcaaccactagtctgctttctggcactatggattagttggcattttggggatttttatataaatgaaatctttggggaacaatctgtaagcttaaagctgctataaaagaaaaacctgaatttaggaaatgtttttagacagtggaaagtgatgtttataacaaaaatgaagttgatacttgtaggttttctgtaatattttttctccttaataagctttttatatgagtttgaatttttgaattattactaaatagagcatatttaaacataaaatgtttatttttaaattaattaaaaatttaatgattttccatttttatgtccccaagttacctcttcaacccaaagttgcttcacttgatttttgtttgtatttttaatccttttacagagcatataggattggacaatgtagagatgtcaaagtgcttaggctgatatccttgggaactgtggaggaaatcatgtatttacgacagatatacaagcaggtaaatatgtttccctttttctgtttcagaggtcaacatttatctgttttcaaaaattaggaacaaatttgtgtaaaatgtaagttttaaatcttactgtattgcggaatttaataagattataaaaattacccttgaatacacttttatgaaacagattctttggttcattgaatttttgagctgaaagttttctagagcagtacctcttaaactttagtgtacatgcgaattaccgagggatcttgtcaaaatactgattgtgatttagtaggtctgagttagagcccatgatgtggaatttttaactagctcccaggagtcctagtaaaactaatcagcccacattttgagtagcaaggtcacagctccccaaattacaggccaagatgtaatggtttaccacaaatgggctacaggtgcactgatatgttggtcccacagctttctggacagcaagagtacctaagccagtgtgttagttcattctcatgctgccataaagaactgcccaagactgggtaatttataaaggaaagaggtttaattgactcacagtttcacatggcgggggaggcctcaggaaacttaccatcatggtggaaggggaagcaagcatgcccttcttcacaggatggcaggaaggagaagtgctaagcaaagagggaaaaaccacttataaaaccatcagatctcttgagaactcaatatcctgagaacagcagcatgggtataactgcccccatgattcagttacccactggatccctgccacagcatgtggggattatgggaactgtaattcaagataaaattcgggtagggacacagtgaaaccatatcagctagctgccagcctttgagtaacctcttctttttacaccaggtagatattcatatgttaccattttctacatgtgccatcacatgaagattagggagcactaccttagaggtgcatgatgtacatgatgaaactgggaccccagagatcccccagtaaatgaaattataggaatagagcttaagtgtgctaactactttcctggtacttttagtattcgtccgaaattgcattaactctttaatatgcttgagatatcaattactacttcatttatgcctctaaacaaacaatatttatttagtttacaactggatacttgagacaatctggaataaggttcacgtgtaatcataaatattacatttgaattgcttcctatatgttcagttggcatctatttaagagcaaacatctgccacatgtgttggtagttaacctaagaatgatccaatcttaaatttatgctattttcttcattctaaaaatagaattgtacacagcagtttttgttttgtcttaaagcttttagctctgtaataaacagttcatttttttttttttttttggtatagcacaactacttgaaaattatttttttctaacctatttaaccaaccttgggaaaaagtgggaagttactcatcttaggagctgttcttttgagtactgtcttagactactctcaagtaagagtctttcctcaattatgtagtaatttttttcagtccattactatatacatttcctttttacctattcatgcgactcatttaatgaaatgtcttgttataaaatatacattgtgcagtagtatatgataaaacacgcttcagaagatgaggtaatttaagaactttatatgacacaaataaagataagatggcaatcatggaaggaaaaggcactaaatatggtttaaagatagtttggaattttaaccaatggagcacaccttctagcctcccaggttggctttcaatcttttggggaaaaaaaatccaaaaattatgtttttgtttttttttttaaattatactttaagttttgggatacatgtgcacaatgtgcaggttagttacatatgtatacatgtgccatgttggtgtgctgcacccattaactcatcatttaacattaggtatatctcctaatgctatccctcccccctccccccaccccacaacagtccccagagtgtggtgttccccttcctgtgtccatgtgttctcaatgttcaattcccacctatgagtgagaacatgcagtgtttggttttttgttcttgcgatagtttactgtgatgatttccaatgtcatccatgtccctacaaaggacatgaactcatcattttttatggctgcatagtattccatggtgtatatgtgccacattttcttaacccggtctatcattgttggacatttgggttggttccaagtctttgctattgtgaatagtgtgcatgtgtctttatagcagcatgattcatagtcctttgggtatatacccagtaatgggatggctgggtcaaatggtatttctagttctaggtccctgaggaattgccacactgacttccacaatggttgaactagtttacagtcccaccaacagtgtaaaagtgttcctgtttttccacatcctctccagcacctgttgtttcctgactttttaatgattgccattctaactggtgtgagatggtatctcattgtggttttgatttgcatttctctgatggccagtgatggtgagcattttttcatgagtttttcgctgcaaaaatctccttaagctgataagcaacttcagcaaagtctcaggatacaaaatcaatgtacaaaaatcacaagcattctcatacaccaataacagacaaacagagagccaaatcatgagtgaactcccattcacaattgcttcaaagagaataaaatacctaggaatcctacttacaagggacgtgaaggacctcttcaaggagaactgcaaaccactgctcaatgaaataaaagagggtaccaagaaatggaagaacattccatgctcatgggtaggaagaatcaatatcgtgaaaatggccatactgcccaaggtaatttatagattcaatgccatccccatcaagctaccaatgactttcttcacagaattggaaaaaactactttaaagttcatatggaaccaaaaaagagcctgcatcgccaagtctcaatcctaagtcaaaagaacaaagctggaggcatcatgctacctgacttcaaactatactacaaggctacagtaaccaaaacagcatggtactggtaccaaaacagagatgtagatcaatggaacagaacagagccctcagaaataacgccgcatatctacaactatctgatctttgacaaacctgagaaaaacaagcaatggggaaaggattccctatttaataaatggtgctgggaaaactggctagccatatgtagaatgctgaaactggatcccttccttacaccttatacaaaaattaattcaagatggattaaagacttaaacgttagacctaaaaccataaaaaccctagaagaaaacctaggcaataccattcaggacataggcatgggcaaggacttcatgtctaaaacaccaaaagcaatggcaacaaaagccaaaattgacagatgggatctaattaaactaaagagcttctgcacagcaaaagaaactaccatcagagtgaacaggcagcctacaaaatgggagaaaattttcacaacctactcatctgacaaagggctaatatccagaatctacaatgaactcaaacaaatttacaagaaaaaaacaaccccatcaaaaagtgggcaaaggacatgaacagacacttctcaaaaaaaaattatgttcttaaaaaaaaaataaacctgtaaaaatgttagaaagcaagaagagttttcttggtggccccaaaattgtaaggagtcctaaaagacaaaaggaaattgggatcagattgaaggaagaagccaagttaaactcagaagacgactactgaaaaggtaggtgcagcctctggatattccaagtttagagtcagcagatactaaaaaagaagggagccttagggtaactgtggagccctcttcagggtatcactgatggtgtaacaagacggtttagcccttataatcctatcccatttggaccaaattacagccagcagaggtgtctactgtcaagtgagaacaataagtagaagtactggaaacaaagaagcaagacagagctccaaatttttctaatattcagaagaaagtccctcctgttgcccagaagactaattacttgcaccctccactttatttcagataagcactgcagtagacagagataagcatgtgaagtatttaaaggcagatgaatagcccagccaaaaataattacccaacagtttaggaaaataaacactttgaaaaaggcactatagcgggctgaatactggccccgaaaaatatcaatttctaatccctggaaattgtaaatggtactttatatggaaaaaggatctttgcagatgtgattaaattatgggtcttgagattcggggattatcttggattatccacaagtgtccttataagaaagagctagaggacaatttgacacagacagaagaggagaagacaatgtaaccacagaggcattgattggagtggtgtgccagaagctaaggaatggtggcagccaccgcaagctggaagagtcaagaagtagattctttgctagagcctccagaaggagtgtggtcgtggtcctgccaacaccttgatttcagtttagtgatactgatttcagatttctggctcccagaactgtgagaggctcaaatgatcctcccacctcagcatcccaagtagctggaactataggtgcgtgctaccacaccaagccaattttttatttttatttttgtagagatagagtttcactctgttgcccaggctggttgaaactgtgttgttaattcagaactctcccacaaagatagattctagcccggatgacttcagtggtaaattctatcaaacacttaatattgtttttgaaaacagaagaagagggaacacttccaacttacttcacaaaaacagtagaatcctgataccaaacttgacaaagacattgcaagaagagaaaatgacagatgaatatctctcatgaacataaatatgaaaatctttaaccaagcatctgttttgagtccattgcaccccttcccctcaaaagataggttgaagtcctaacccttggtacctgtgaatgtgatcttatttgtaagtagggtctttgcagatgaggttaagatgcgatcacactggatgagagtggtccctaatccattgactgataccttataagaagggggaaatttggatacagacagccacagaggaagagcaccatgtgacaatggaggcagagattggagtgatgccaccacaagccaaagaatgctacggattaccagcaactaccagaagctagaaagaggcaaggaaggatcattccctaaaatcttcagacagagcatggccctatggacaccttgatttcagatttagctgcacaactatgagaaaataaatttctattgttgtaagacatccaatttgtagtactttgttacagcagaattgggaaactagtgcagcccctaaggcaaatacagagtattgtaaatttgactatatttttgtatgaaacttctgtatgacaaaggaactgcaaaccaaattcaaagacagactaggagcatatgtttgccatatatgtaataaaagagcagcatgtacaaaatataaagaactcccactgtattagtctgttttcatgctgctggtaaagacataccagagactgggttataaagaagaggtttaatggacttacagttctgcatggctggggaggcctcacaatcatggcagaaggcaaaaggcacatcttgcatggaggcaggcaaagagaatgagaatcaaacgaaaggggtttccccttataaaaccatcagatctcgtgagacttattcactaccacgagaacagtagggggtgaaccgcccacatgattcagttatctcccactggatccctcccacaacacatgggaattatgggagctgcaattcaagatgagatttgggtgggaacacagccaaaccgtatcacctacaaaccaatgaaaagaataataggcatttcactgaattaaaaatgcaagtggttaacacatgtgaaaaaatctttttaaccacactcataatctagagatagaaaataaaataagaccatttgcattgtatattctgcaaaagcttttttaaaaaatgcatattgaggtgttttgggggggttggggagattggtgctgttcattgttggttggggcatttgagagatgctcatatactactgttgagagtacaactggtataggtatatgtagagtctccatagctaactgacagaaatcctctcacatacgcacagtgaaggatgacaagggcttttacttagcattgcttgcatttgtttaaaaaacaaaggaaacaacctaaatgtctgacagtaacagaataaattctgatacctatattactttgtgacagcaaaatttaaaaaattatagtcagatcaaatgtactgatgtggcaagatgtctgaagacatttttaagtgagttgaaaaagcaatatacagaacaatatctacagtgtttcagtgtgtttagaaataaagctatttctgtgtgacagactgtccctgatttatgacatggttcaacttaatgtttttcagttttatgatggtgctaaaatgatacctatttatgtatgaagtatgttcctctacttacgatggggccacatccagataagcctatcgtaagtccaaaactcactttagacctaatggtgttttcaacttacaatgggtttatctagatatagccccatcataaattaaggagcatgtgtatgtataaatagctttaacttcattgaaagatacctagaaggatgcacctaaacgttacagcactggttagactaataaggagtgacctgtattgttcatgaggggcttttattttgataccttttgttgcatctgttgtgatgatgcattcagatattttatacattttaaaaatataaacatcacttttacagcagctgtgctccttcaggtttggagcatttaaacaatctaaagtttggcattcagaaagtcatctcgtctgtgtgtgtgtgtgtgtgtgtgtgtgtgtgtaaattttatttgtaagtgtttgcagaagaattgcaagaacagcagaaagaacccccagttagcttcactcaaatcactcaaattccctatttgctgacattttacacacttgctttctctttgtctcagccattatctttattctttttctgagccatttgagagagttagacttctcatcagtatgtatttccccaaagaagcaacactctcctaccaacactctaaattttccagtatgtatttccccaaaagaagtacactcctacttaaatatacataaaaaccagttttatgcattctaaacactcagttgtatatacggttctacaactcgctttccccaccctccacactcctctccaaaatgcagttattcacatgaagaaattaactttgataaaacatgatgctgtaatccataggacccattcagtttccccacctctctctttttcctttctggtccagggtttcatcaaggttcatggctccatttacttgtgtctcttcagttttcttcagcctggaatattatccaggctttgtctttcaagaccttgacagctttaaagaataaggcctttgtgtaggatgtccttcagtctaggtccatttgatgtttcctcatgtccagactcaggccaagcagtattggcaggaataccacagacatgatactgtgctcttctcgttgcatcagtcagaaggcacatgggggtgacctgccctactactgctcacgttaaccttgatcgcaggtcaagtttgtgtctgctaagtttctccactgcaaagttactatttttttctttgtaattgatatgtagtttatggggagatcctctgagactgccagttcctcatcagacctgcacgcataacccttagtgttcattcgtgattcctgcctgagtcagctaccactataatggttgtcaggtggtgatttttctatttccattatccttcttggttgttgtttggcactctaccatttaaaaaagagctttcccttctatttatttaatttgtgtggtctcatggcttcctattttagtaatagattacaacacattgaatatcactatttatttgatgttcacattgtcttatatttggccaatgggaacccattagggtggcttctgtgtcatttcgacttgctcccatcattctttttgcacttctttactgtggtaggctgaataatagtctcccaaagatgttcacattgtaatcccccaaaccacctgggttatccagatgggccaatgtaatcacaagggattttttataagggtcagatgtgcacatcttcatctctgctagctctgaccctactgcctaataacccgtggtaaggaagcaaagggtcagagagaaaaataatgaagatgccacactgctggccttgaagatggaagaacggccatgaacttcttaacatcataaatgttcttttctttttacttctttctttattttgtctattgttatgatgagatccaagcattttctcccttgtatggatttttcataagctacgaactaagctacattttttagttactattttccccctaacttcttgaatttgaacatgatttcatttttagttagcctacagatggaagcacctggtttccacttttactggagccactttagtacaaaataatgtgctttttataaattttgtaataaaactttgctaggaagcttataaagactcaaattaaggcttacaaattaccttggtgattatagttacaggtcctgcagtctgacaatatcagtgtttaaggtagtttcagtaacaagggtaaaataggtaggtacccgggctatcacttgtatcaattgttattgtaattctgtactcccaggattacagcccatgttcattggtatcaaattgatcaagttggtatgttgatccataacttctttaaatgaaggtcccgagggttttttttaagagaggcatcttgaaagtgagaaattagttaatagtataaattttagattcagccaaaccaaggttcaaattctaggaatgacacttcttagctggcagctgtgagcaagtcacttaatttctctaaacttgagttactttatttttaaaatacagaaattttagttattttatttctaaaattgagatgatataaggttgtaaggattaaatgagagtatggaaataaaatgctatacatgtaataaatgttcagtaaatggcagctgttattaacaagaattttaattgcctagagtaacttattacagtgcaaatgaactctgatgataatctcaatagttaagcatttctctttttttgttttttgtgacggagtctttgtcacccaggctggagtgcagtggcgccacctcgggttgcttgcagattccactaggttcaagcaattctcctgcctcagcctcccgagtagctgggattacaggcacccaccaccatgcccagctaatttttgtattttagtagagaaggggtttcaccacgtcgaccaggttgggctctgactcctcaaatcaagtgttcctcctgcctccacctccacctcccaaagtgctgggattacaggcatgagccattgcacccggcccttaagcatcattttttactgatttctccgtcagtgggctgaagttattttccattctgtgcattctttgtttctttcaaggaattttaaagtacacatggggttaatcagattgtattttaattttacatatttatattacatttagtaaaatatccagcaaatagtgcatattaatgttgatactgaaatggtgtttttaaatgttccatgtcagtgttctttctgtattcaaaattatgtcaaagatgcagtgtttcttaaaacagtgatagggtttttgctgttagtaggcaatgtagtcaagccacaattagtttgacaccaaggtggttatcatatcattactttagattgtaatttaacttcagtgatgtagtaattacttctgccagttttagtagttgctattgtaataagagttttaaaaggagaaaagtatattcaaatgtatgcttttattattaaacatttatgtcaggtggatattctatagagatgtaatcttgactcagttgttagaaaacagataaaataggaaatataagatctctgtttcaataagactggccagattattattatttcaccataatggcaacatctgccagggaaattaaaacaaaatttcctccctaaggagattctgcctgctccagctaaagctgtgtatatacagggaatgccaggaaattctgacatattgttggagcaaacacttcaaaaatgtcttgtgttttttctgttttagcaacttcactgtgtggtggttggaagtgaaaatgccaaacgatattttgaagcagttcaaggatctaaagagcatcaaggagagctttttgggatccataacctcttcaaatttaggtcccaagggtcttgtcttacgaaggacatcctggaggtgtgaacttcttctctgaccttttcaataatattttaaatacagtttttcttcctcaggaaatctgaaatacaattgctgttgccttttcagagaaacttttggttttctttatcaaaaatgccttggaatttttacttttagagaataagaaatgaattattgtacctctaaactaagattttcccatggataattacaaataatgcacacacacaaatgtatatgctgggtagtatgaactccaaggcaattttaaataggcagagagaagtttatagttttgaaaacagctgctgaagtcaggaactaaaaaaagaggttttcctaaataaacaaaaatataaaatgtgttttaattaaaagttaccaaatactccctgagctgtactctcatgtctcatggagatttttgttttctgttcccaataaaaattccacaccagtattttaaactctccctgttgtgttcatcctcagcatacagatgtttcttattcctcaaacaaaatattttatatccttttttaaaaaaatctttaagttcttttatataccggaatactaaggatattaacctattttctaattgatattcatataggtatcataaaatcctggagtatcatctttttcaacctcctcatggtatagatgaggaaactgagtcttagagaacttcaggatatttctcttgacttccaggactttgtagtaaaatcttaatgtacttcatttattcagtaagtaccataaaggcagttcaaggagcaattggttcctgtccttgaggaacttaaaccatcttgaccggaggtggaagagaacgtttacataataaccatgcaatgtcaggaatcgtatgctgaacaagttaaacagtagaccatggatggctgggggagaggaaggtatatattatttgaatcctataaatgttgttactattatacagtttctgatatatactgctgagtttctattttatagtaactatatttgattctgaattcagtggcccatttggagtcctactttttggggttttttccccttgctttttaaatacgctgtttctttcatgaatttgttctttccagtttcccttttcatatcaataactttgtttgccctccagctcccaaacccagctgctacctccatctcagagtactacttgacatgcctatattgatgttaaagtcaattgtctataaaaatattagcattttattatttatcctgttttctgtcatatatgacatagttacctgtttttatcagaataaccacctatttctttgttaaacaagtgttatataagacatatcaggatgacaggttattaagtagaaaaagttcccttgtttatcgtgccactgcactccagcctggggaacaaagcaagagacttgtctcaaaaacaaaaaacaaaaacaaaaaaaagttctcttgttcactggttattctaagaatatcttgtttcaccttcagaagtgtttattaatgacaggaccatccatgtcttacattttcttttttaaaaatatcttttaagttctttaatataccagaacactaagaatattaacctattttctaattgatattaataaggggtgacaaggccatccatgccctacatttgtcttgctaggcatatcattggcacttgattattaagttaaattttgaattaaaattactcatttgtcatcaatcagaatgtaaatttattcaggattggttagattcatgctgctttgggccaaaaggtgcttctaaatattattattagccccatataatgggagtacctatcataaagtaaaaggagtatttcacttcatgtgagacatttttaatttttaaaggttgtataaaatctcttttaaaatgttttaagatgtaaaaatttgaatatttacacttataatcttatgatttctgggcaatttcattctgttttgcattgactttccattatctatattatggtttctcttcaaagatagatattgagagttcattttacaagtatttgttgagcatctgctaaatgtcaggtactgttcatagagctttgcatacataaaagaacaaaataaacaaaacgatcctgtctaccagaagtctgcattctatatggggagacaaatgataaacaataaataagtgaaatatggaatgtattatgataggttctaaggataaaaaatagaacagggaagggaaatagaaactgttaaggaaggggcattgcagttttagatggggtagtcaaggaagccctcactctgaaggctgcatttgagtattcaaagaggtgagggaggaaggtgtgttttagataggggaaacaaatgcagaggtcctgagggaggaacatgccccgtgtgatctccaatgtcagggaggccagagtggttagagtggggtcagcaagagagcaagagatggagccggagagatgacagagagccagaccatgcaggaactttgacttttacttgaatgagacaaaaagcaattagagggttctgaacagaaagatgacatagtctgatttatattagcttgacttactattgaaaactagactatagaaatacaaggacagaagcaagaagccagttaggaggatactgcagtaatccagctgagagatgatgtcggcttgagccagggtgattgtggtgggtggcatgagaagtggctggatgctgtatatattatccaggtggcactgacaggatttgctgacgggtcagatacagggtatgagtaaaagagaagagttaaggatggctccaaggtgtttggcctgaacaacttaagactggagtggccatttatctataataacggagtttcaacagctttaagatttctagtactgccactttcacctgttgtagtcatttagcttctgttacagagataaatggtagcctgggaatgaggcttcccatcccattgctgtaatagcttccaggcatggagaataaaggacttgcagcagttcagaaactatcattccctagagttccataggggagattctcactcattgccctggataccaggtggctggaaccacgccattagtgtgtctgtattcttaagttgggcatttgtaactctagtgatggtagtattatttctccttgctctgtcaacaaatatagccttaaaaagagaattgatttccttttgaggagaatttaatattctagaatctaggccattagaacttctgctaaatgatacaccagaagctttaaagtccaaatactttcccaaaagatagcaagcctgttatataactagaatattgtttttagtttcatattagggtggaccttttcattttgatgtctcctacacctaaggggtatttttaaatgaatatgaacaataaatatagtaacaatataggctagaatatcaagttcccaatattcaacattgtggtgtttgaaatgttaatatgtccttaccataattattgtatgggaatggttgttatggatatcatactgggtaaatatttcacatttcttcactctccctcttcccactagtacttttaatgaagttggctggaaagtattagttttctgtgtatgtaaaagtaaactttaacacaagaattaagagtatttttagaatgttatataaatgtttatatatgagtttcttaattagcaagttgaaaaataacattaagaatgctaaagcaagctgcatgcaatttttctttcttagctccaagaatagcatgcattgctgttgtttatctggttgttgctaccccctgtgttgcatagctatttgcattctttcttactgacattatagagagaaggccaagtagaagcagggatcatgacagccacaacatggttgaaagagggacctccagcacacaaactggaaatggtatgtaatatttgaacctgtagactacaacacctagaaaacatgtactgtgacaattttgtttcttttcctttttccttaattttataacctgtaaaaaaaaaaattaagagtcaaggacacaaagtcagaggactatggataaaattaataattaaggctgatttaacattcatattataagaacaaattcaggagcagttcaggcatttacagctaaactgaattttaactacaccaaactgaaaatccagtaccacctagataactaacccatcccaaataaataatttttgactaaatggtaagttaaatggaaaaatcaccatcaatgtgtatttaaaattattgaacccaaatatcaaaattattctctaacctgaaagtagatatttgattccttaattttgtgatctttttagtagcttgtcatctcatgtaccaccaaatctttatttcatcataaggccatcttaaaggtaaaaaacatgtgtggaaggtttttttgttattgttgctggttttttcttgtttgtttttagagtcttaactatcaatttataccagtccaatgagtttaaattggggatgaaatttctataaatttagagaaatatatgaatctcaaatattggcaaaagtattatcagataatactttccgcaatattttactagtagagcctcagttttagaaaactaggttatatttaactctgattaatgtgcaaaggttacatattgaatttaaatttgtagcaaattttacttcaaaattctttatttctggtgatcaagatcctatcggcctttttaatcaattagaacaattttccagtcttgaattctttaccttgttaactcctgtaatctgtcttattcttaaagcgtgattggaagcatctgctagatgacagtaaactccagtaattcttaagcagtaagttgtatgcttttcactttcgaggccagaattatgtgtccttgcatcttagaagccaaacactccactttgtgtttttcttcaaaatactttgattatatggtactctagtttaaatttttttattttgcaacaatattcaacatggaaagagaaaagactaccagactatgatattaaatccttaacatttgtttattaaatgttgtacttttagaaaatattaagtgatatacttgtacctaaattacctgcccaaagttgagtacttttcagttgattccacattatatcttgaggttttctgatgtttttgtcattgtttctcctatagcctagacagcctgactgtcaggaatgcagaggtacagaacaagctgcagagccactggcaaaggaagcatgtgatctctgcagtgacttcagtgatgaagagccagtgggagccacaggaataaagactgccaaaaacaaagcacccgattcaagtaaagcttccagctctccaggacagcttaccttactccagtgtggtttctcgaaattgcttgaaacaaaatgtaaagcagttgaggatagtgatggaaatactgcctctgatgatgaaagttctgatgagcagcccacatgcctttcaacagaagccaaagatgctggttgtgagaaaaatcaggactctcttggtacttcaaaacatcagaaattagataacatcctaaatccaaaagaaaagcatattttttataaaagtgagaagattttagaacagaatatttcttccaagtctgacgagaaaaaaattaaaaatacagataaacattgcattttacagaatgtcacagaatcagaagatagtgatgtcatctgtcctacacaatacacaactgagagattccccgacaatagtataaggtttaagccacccttggaaggatctgaggattctgaaacagaacacactgtaaaaacaagaaataatgataatagtcgaaacactgatgacaaaagaaatggaataatttcaaaaaagttaagtcctgagaacacaaccctgaaatctattttgaaaagaaaaggcaccagtgatatcagtgatgaatctgatgacattgaaatttcttccaagtcaagagtaagaaagagagctagttcattgaggtttaagagaataaaagaaaccaaaaaagaacttcacaattctcccaaaacaatgaacaaaacaaaccaagtgtatgcagcaaatgaggatcataactctcagtttattgatgattattcatcctcagatgagagtttatccgtcagccacttcagtttctctaaacagagccacagaccaagaactataagagacagaactagtttttcttcaaaattgcctagccataataagaaaaatagcacttttattccaagaaaaccaatgaaatgttcaaatgagaaagttgttaatcaagagcagtcgtatgaatcaatggataaatttttaggtaactaaagacacattctcaaaactttaaaaagtatatttgttttatcaaatagttctgtgagacgctttgaattaacttgtaaaacagccctaaaatcaagatgctgcattgaggcacaaataaggaacggttgggtagcaggataaatgggagaccacatataggtcaagatagagaatgttgccatctaccccaggaccccctccatgtgcccatctaaatcacagttcctctgcccccataaataccaattattctagcctctatagtaattacttatttacatttatatggttttatcaccaaatgtgcatccccaggtgaattaatctgttttcatgctgctgataaagacatacttgagactgaagaaaaaggggtttaatggattcacagttccacatggctagggaggcctcacaatcatggcggaaggcagtgaggagcaagtcatgtcttacatggatggtggcaggaaaagagagagagcttgcagaggggaactcctctttgtaacaccatcagatctcatgagacttattcgctatcatgagaacagcatgggaaagacctgcccccatcattcagttacctcccaccaggtccctcccatgacacatggggattgtgggagctacaattcaggatgagatttgagtggggacacagccaaaccatatcactaggtattatggttcagtctcatccattttgtaaaaatattatatagtcttttttaatctacaggaatcctcatccctttcattgccttacaatgtaactatggaagtacctggaccatctcttacagagtttccctcagtttgcattttgctaattgtaccctctccatgcagttaaacatgttcttctgtcttctatattacctgcaaaagagcagttggttcctgagactggatcagactcaggttcagttcctttggcaagatataagttagtgtttaacaagactatagtaggcacaaaatgtttattctctctctttatgatcctagcagccattgatacttaatacctatacttatttattcattcagagtagcaaaatattttctctttctttcgatttcattttcatttatttagaatgcttttgtaaagaggtacttcactacttcccttcattattgcttacccagtggcgcagttcatatgggagagacaggaaaaatgctaattgctttctttatttaccagtttttagtattaaactaaatatgtctatatgccataaggatgacccattcttttcttagtaattgattcaaacacatttagtgggtctcaattcattgcaattaataatattattaaggctccattgtcctatctgtggatagaggggaatctctgacatgaatattttggttcctgaagcattttggcatgctgctagtcattttggaagcttccttgtagtctagtcttacaagaggttccaggaacacctcatacattttctgtcccagacctacaatcagtcattattccaagaagtcttggtttcttttagagagaaagtgtgtttcaagaccacagtctggtgctagtaatgaacattgctactgttgacttggttattatttttgggccttttcagtggccagatttgtgtgtgtgtgtgtgtgtgtgtgtgtattttatatttatacacatatatgtgtatgtatacgtatatttgtgatatatattttatatatgtatgtacacatatgtgatgataaaatacctcgaggttatacgtccatatttgtattgatacttaatttgagagtatagagctcttatttagcctctttattatatgtgaataccatttctacaatattgataattctggttctcaagcatatagggaatgatttacttttaatgccccatgtttgctcatttgctttatcccatattacacaaagaataaaataacagtactaccaccatttgattgctggtaacatttagggtttatctgtttttgcctctactctcccttttcttccattttaaaaatggatatactatgtcttcattgtcaaagatacattgcattgtatactactcccctcttagacttcacttaactgttggtccacaggtaactacacatttcatgctccccatcagtccttaatgtcagtcttcctcgcatcgttctggttgtctgaatcttactgtctagtagattgctcaagaagtgttcatgagaataatattccctgagattcttgcagtaacagttttgtgcccttatacctaaaagtcagttttgctggatgtaaaatacttggctcacattgtcttttcttgagcatcttaaatatgtagctttgttttcttctggcataaagtgtggtattatatgttctttttttttttttttttgcctctccctggatgcccagggggtttttttcttttcattgttgtccaataattttactagcttgtgtcttcatgttggttatcctgggtccatattctgatatacacagtgttgttttcactcaaattttattttgggaaagatttgcttgtaccagtgtttttagttacttgttctattcctttggtttggctttcttcttcagggacttcttttcagatgttcagtcttctttgcctatcttcagtttttgtcacattctctcaaatctttatctgttcattttgttttgcttttttaaaatgttgttttgtttctcttaaggcttatctgttgtgtttattcccacttatgttccttctagtttagtcttcatttttgaaatttaaaaaaaaatttctaagtctttcctaagttcttatcactcatttgagttgctctaattctgatttacgttgattcatgtctttttctgttttgtgagcacatctttctagcacattttcattgaagggatattactctgcttgttctcttttttctcacaataatttttttgagatttgaccctgctgcttttcccttggtcatttttatatgaaattatttcccctgaattttacaaatgaagcagagcttaggaaatcttttctcacctcacagagatccgtatgttatttccatgtagagtgctgcactgtggtgggctttcctctcgctctctctcccttgctttgctctaggtcttttcttgccctcatccttgttcttcctatcctacttattttgattctctcccagcagtttttcctctttattgggccctgacctgggtgggagccctggtgggtcagtttggggagttctagtggttggcctgctccagcccctccaggccttcttactgtgtcccctctgcaccctctcagcattgaagagcaacaaaccttcccagattcagctgctgttctccagctggccccttgtgctttccggtgaatacctgttggcagttctggggtctcctgttcttaggtctgtcaggtaccctgttgcttcctactttcacacagatactgaaaccatgcagagttcatagctagtggagattttccccacctgcttgtactttaggtgtcatgagggtatcttgttatctaattttgttgtaaatgtccatgggcttttggttttgctgtctagttgctgtctgcttttg

SEQ ID NO: 293 - DNA, 2350 bp, Homo sapiens
gggggtcgccttgccggcctcctgtcctcctccggcggcggcggagcccgagagaactaggtgaacaccgctttgccagcctcacacagcgtcccctggctctgccgccgctccggacgtcgccctcccgttctgcttgggtccccttagtcgctacctttgctgggatccccctcctccatcctgtggcttcgggttgccgaagagcgatgctcggagggcggccggaagtggcgttggccgccattggcctgccggccagccaccttgctgtcctccgccgccttccgggtgttacgtgcagccgggctcggcccctccccctggccggatggatccgtcggcgccacagccccgcgcggaaacctcaggcaaagacatatggcatccaggagaaagatgtcttgccccttctccagataatggaaaactttgtgaagcaagcataaaatctatcacagtggatgaaaatggcaagtcatttgcagtcgtcttatatgcagattttcaagaaaggaaaatacctcttaaacagcttcaagaagtgaaatttgttaaagattgccctaggaatcttatatttgatgatgaagatttagaaaaaccttatttcccaaaccgaaaatttccatcatcttctgttgcttttaaattatctgacaatggagactctattccttataccatcaataggtatttgagagactaccaaagagaaggaacccggtttctttatggacactacatccatggaggagggtgcattctgggtgatgacatgggacttggaaaaacagtacaggttatttcatttctggctgcagttttgcataaaaagggaactcgtgaggatattgaaaataacatgccagagtttttactaagaagtatgaaaaaggaacccctttcttctacagcaaaaaagatgttcttaatagttgctcctctttctgtcctctacaactggaaggatgaattggacacctggggatatttcagagtcactgttttacatggaaacagaaaagataatgaattaattcgtgtaaagcagaggaaatgtgaaattgctctaacaacttatgaaacactacgcttatgcctggatgaacttaacagtttggaatggtcagctgtcattgtggatgaagctcatagaatcaagaatccaaaagctagagtaacagaagttatgaaagctttgaaatgtaatgtccgcattggcctcactggaaccatccttcagaacaacatgaaggaactgtggtgtgttatggactgggctgtgccaggccttttagggagtgggacctacttcaagaagcagttttctgacccagtagaacatggtcagagacacacggcaacaaagagagaactagccactggccgaaaggccatgcaaagacttgccaaaaagatgtctggctggtttctcaggcgcaccaagactcttatcaaggatcagttgcctaagaaggaagaccggatggtgtattgttctttgacagatttccagaaagctgtctatcaaacagtgttagaaacagaggacgtgactttgatacttcaatcttctgagccttgtacctgtaggagtggccaaaaaaggagaaattgttgttataagaccaattctcatggtgaaacagtgaaaaccttgtatctcagttaccttacagtccttcagaaggtagctaaccatgtcgcgctactgcaagctgctagtacttccaaacaacaggaaacacttatcaaaaggatatgtgatcaggtattttccagattcccagattttgtgcagaaaagcaaagatgcagcctttgaaacactttctgaccctaaatacagtggaaaaatgaaggtccttcagcagcttttaaatcattgcaggaaaaacagagataaagttcttctcttttctttttccaccaagttgcttgacgtgctacagcagtactgtatggcgtctgggcttgattaccgacgacttgatggaagtacaaaatcagaggaaagactcaagattgtaaaagagttcaacagtacacaagatgttaacatttgccttgtctctacaatggctggtggactaggcctcaattttgtcggtgccaatgttgttgtattatttgatcctacttggaatccagccaatgatcttcaagccattgacagaacccaaacacattgtaggagagaaagggatgctgagcccctctcctctgctcctgggttgcagaatggaagtgagaatgcagtaccttacccctggtggtgctgtgtcacaggagcctccatttcctgctggagatgtgagatttgcaggatccaagatgtcctcgagtaa

SEQ ID NO: 294 - protein, 668 aa, Homo sapiens
MDPSAPQPRAETSGKDIWHPGERCLAPSPDNGKLCEASIKSITVDENGKSFAVVLYADFQERKIPLKQLQEVKFVKDCPRNLIFDDEDLEKPYFPNRKFPSSSVAFKLSDNGDSIPYTINRYLRDYQREGTRFLYGHYIHGGGCILGDDMGLGKTVQVISFLAAVLHKKGTREDIENNMPEFLLRSMKKEPLSSTAKKMFLIVAPLSVLYNWKDELDTWGYFRVTVLHGNRKDNELIRVKQRKCEIALTTYETLRLCLDELNSLEWSAVIVDEAHRIKNPKARVTEVMKALKCNVRIGLTGTILQNNMKELWCVMDWAVPGLLGSGTYFKKQFSDPVEHGQRHTATKRELATGRKAMQRLAKKMSGWFLRRTKTLIKDQLPKKEDRMVYCSLTDFQKAVYQTVLETEDVTLILQSSEPCTCRSGQKRRNCCYKTNSHGETVKTLYLSYLTVLQKVANHVLQAASTSKQQETLIKRICDQVFSRFPDFVQKSKDAAFETLSDPKYSGKMKVLQQLLNHCRKNRDKVLLFSFSTKLLDVLQQYCMASGLDYRRLDGSTKSEERLKIVKEFNSTQDVNICLVSTMAGGLQFVGANVVVLFDPTWNPANDLQAIDRTQTHCRRERDAEPLSSAPGLQNGSENAVPYPWWCCVTGASISCWRCEICRIQDVLE

SEQ ID NO: 295 - DNA, 2431 bp, Homo sapiens
gggggtcgccttgccggcctcctgtcctcctccggcggcggcggagcccgagagaactaggtgaacaccgctttgccagcctcacacagcgtcccctggctctgccgccgctccggacgtcgccctcccgttctgcttgggtccccttagtcgctacctttgctgggatccccctcctccatcctgtggcttcgggttgccgaagagcgatgctcggagggcggccggaagtggcgttggccgccattggcctgccggccagccaccttgctgtcctccgccgccttccgggtgttacgtgcagccgggctcggcccctccccctggccggatggatccgtcggcgccacagccccgcgcggaaacctcaggcaaagacatatggcatccaggagaaagatgtcttgccccttctccagataatggaaaactttgtgaagcaagcataaaatctatcacagtggatgaaaatggcaagtcatttgcagtcgtcttatatgcagattttcaagaaaggaaaatacctcttaaacagcttcaagaagtgaaatttgttaaagattgccctaggaatcttatatttgatgatgaagatttagaaaaaccttatttcccaaaccgaaaatttccatcatcttctgttgcttttaaattatctgacaatggagactctattccttataccatcaataggtatttgagagactaccaaagagaaggaacccggtttctttatggacactacatccatggaggagggtgcattctgggtgatgacatgggacttggaaaaacagtacaggttatttcatttctggctgcagttttgcataaaaagggaactcgtgaggatattgaaaataacatgccagagtttttactaagaagtatgaaaaaggaacccctttcttctacagcaaaaaagatgttcttaatagttgctcctctttctgtcctctacaactggaaggatgaattggacacctggggatatttcagagtcactgttttacatggaaacagaaaagataatgaattaattcgtgtaaagcagaggaaatgtgaaattgctctaacaacttatgaaacactacgcttatgcctggatgaacttaacagtttggaatggtcagctgtcattgtggatgaagctcatagaatcaagaatccaaaagctagagtaacagaagttatgaaagctttgaaatgtaatgtccgcattggcctcactggaaccatccttcagaacaacatgaaggaactgtggtgtgttatggactgggctgtgccaggccttttagggagtgggacctacttcaagaagcagttttctgacccagtagaacatggtcagagacacacggcaacaaagagagaactagccactggccgaaaggccatgcaaagacttgccaaaaagatgtctggctggtttctcaggcgcaccaagactcttatcaaggatcagttgcctaagaaggaagaccggatggtgtattgttctttgacagatttccagaaagctgtctatcaaacagtgttagaaacagaggacgtgactttgatacttcaatcttctgagccttgtacctgtaggagtggccaaaaaaggagaaattgttgttataagaccaattctcatggtgaaacagtgaaaaccttgtatctcagttaccttacagtccttcagaaggtagctaaccatgtcgcgctactgcaagctgctagtacttccaaacaacaggaaacacttatcaaaaggatatgtgatcaggtattttccagattcccagattttgtgcagaaaagcaaagatgcagcctttgaaacactttctgaccctaaatacagtggaaaaatgaaggtccttcagcagcttttaaatcattgcaggaaaaacagagataaagttcttctcttttctttttccaccaagttgcttgacgtgctacagcagtactgtatggcgtctgggcttgattaccgacgacttgatggaagtacaaaatcagaggaaagactcaagattgtaaaagagttcaacagtacacaagatgttaacatttgccttgtctctacaatggctggtggactaggcctcaattttgtcggtgccaatgttgttgtattatttgatcctacttggaatccagccaatgatcttcaagccattgacagagcatataggattggacaatgtagagatgtcaaagtgcttaggctgatatccttgggaactgtggaggaaatcatgtatttacgacagatatacaagcagcaacttcactgtgtggtggttggaagtgaaaatgccaaacgatattttgaagcagttcaaggatctaaagagcatcaaggagagctttttgggatccataacctcttcaaatttaggtcccaagggtcttgtcttacgaaggacatcctggag

SEQ ID NO: 296 - protein, 694 aa, Homo sapiens
MDPSAPQPRAETSGKDIWHPGERCLAPSPDNGKLCEASIKSITVDENGKSFAVVLYADFQERKIPLKQLQEVKFVKDCPRNLIFDDEDLEKPYFPNRKFPSSSVAFKLSDNGDSIPYTINRYLRDYQREGTRFLYGHYIHGGGCILGDDMGLGKTVQVISFLAAVLHKKGTREDIENNMPEFLLRSMKKEPLSSTAKKMFLIVAPLSVLYNWKDELDTWGYFRVTVLHGNRKDNELIRVKQRKCEIALTTYETLRLCLDELNSLEWSAVIVDEAHRIKNPKARVTEVMKALKCNVRIGLTGTILQNNMKELWCVMDWAVPGLLGSGTYFKKQFSDPVEHGQRHTATKRELATGRKAMQRLAKKMSGWFLRRTKTLIKDQLPKKEDRMVYCSLTDFQKAVYQTVLETEDVTLILQSSEPCTCRSGQKRRNCCYKTNSHGETVKTLYLSYLTVLQKVANHVLQAASTSKQQETLIKRICDQVFSRFPDFVQKSKDAAFETLSDPKYSGKMKVLQQLLNHCRKNRDKVLLFSFSTKLLDVLQQYCMASGLDYRRLDGSTKSEERLKIVKEFNSTQDVNICLVSTMAGGLQFVGANVVVLFDPTWNPANDLQAIDRAYRIGQCRDVKVLRLISLGTVEEIMYLRQIYKQQLHCVVVGSENAKRYFEAVQGSKEHQGELFGIHNLFKFRSQGSCLTKDI

SEQ ID NO: 297 - DNA, 37529 bp, Mus musculus
  misc_feature (1)...(37529): n = A,T,C or G
catgtgtagacgctcttgctttcactgccagcaagaaagccctgaccactatccggcacaacaatcctgactttcccactaacccaggatccaacttgtaacacagatttttgtttagaacttgttcaaaacatcctttcttagctgggcataatgatgtgtgatgctattcgcagcactccggtggcagaggcaaggcagatctctatggatacaaggccaacctggtctaggccagctagtgttacatagtgagtcaccatctcaaaacaaaaaggcagagggtgttggagagatggctcagcagtccagaccactggctactcttccagaagatccaagtttgattcccagcacccacaagtatgttcaacaccatttccagggaattcgaggcccttttctggtctccttcattacctggcatgcacatagagtacagacatacagacaagcaaaacaccatacaggggactggtgagatggctcagggggtaagagcactgactgctcttccaaaggtccagatttcaaatcccaacaactacatggaggctcacaaccattcataatgagatctgacgccctcttctggtgtgtctgaagacagctacagtgtacttatgtataataataaatagatcttcaaaaaaaataccatacacataaaatgaattaatttattgattgtgaaaagtcagcttggtttatataagaagatcctatcagaaataatagcagggatacctgtgctgactctctactttgaaccctgccaatcttatttaagaaccatggcttcaccaagcactgcactcctgcttactgcacggctgctttgaccagaaatcacaaggctccttgtcctgacccttacaagagccagaccctccaactgtatcaggacatctgagctcaagagaaactcttttcttcttttcaaaaggaactcttctctcctttacagaaatttgtgctctcaccttttctaggaacttgattctctctaggaatggtctcctagcaagaatgcagctcattgaaagagcacttgccaagaatgtgcaaggtcatgggttgtgaagaaaagtcacagggctggttaccagtgttaattactagaatcaatagtatacaccacaggactggttggcagcgttgcttactagaatcaataggataaacatttaagcaagaagcctttgaaaggcctggggatgtagctcagttgacagagtgtttgcctaagccctgagttcaatctccagcagcacaaagcacaggaaggcatgggggcaaatgcctgtaattccagcacttggagacagaaggcaagaggatcagaaacaggaactctgaggtctctgaagcaagcccagccatggccttatgctgaaaggcttgctttactctgtatggggctccactgtctttttctttttttttcaatttttcaagacagggtttctttgtgcagtcctggctgtcctggaactcactctgtagaccaggctagcctcaaactcagaaatcctcctgcctctgcctcccaagtgctgggattaaaggtgtgtgccaccactgccctgtttggggctccactgtcttgtttcattttgtgttttgaaagtttctttgtcctggaactccatctgtagaccaggctggccttgaactcagagatccatctgcctctgcctcctgagtgctgtgattaaaggcatgtgccactgctatagccccatggacccactgtttggaattaacaaaagaaacaggaacccaggtcttggaagtaaccacagtccaaactttgcatgggacaggatggttcccagcagacacagtcaccctgagctgtagagaaactctttgccgttaaactcaatagtaaccttctatcaacnnnnnnnnnnnnnnnnnnnnnnnnnnnnnnnnnnnnnnnnnnnnnnnnnnnnnnnnnnnnnnnnnnnnnnnnnnnnnnnnnnnnnnnnnnnnnnnnnnnnnnnnnnnnnnnnnnnnnnnnnnnnnnnnnnnnnnnnnnnnnnnnnnnnnnnnnnnnnnnnnnnnnnnnnnnnnnnnnnnnnnnnnnnnnnnnnnnnnnnnnnnnnnnnnnnnnnnnnnnnnnnnnnnnnnnnnnnnnnnnnnnnnnnnnnnnnnnnnnnnnnnnnnnnnnnnnnnnnnnnnnnnnnnnnnnnnnnnnnnnnnnnnnnnnnnnnnnnnnnnnnnnnnnnnnnnnnnnnnnnnnnnnnnnnnnnnnnnnnnnnnnnnnnnnnnnnnnnnnnnnnnnnnnnnnnnnnnnnnnnnnnnnnnnnnacatggtgagattttacttctttcaaaacaaaaaaacagccgggcagtggtggcacacaccttcaataccagcacttgggaggcagaggcagaggcaggtggatttctgagttcgaggccagcctggtctacagagtgagttccaggacagccagagctacagagaaaccctgtctcaaaaacaaacaaaacaaaaaacccaaaccaaaaacaaacaaacaaacaaacaaagcacagctgaggtacatcagttagtaaagtgcttgccttacaaagaccaggacctcaatttgactcccagaactttggtaaaacaggtcatcttgcgggagcatacttataatcccagtactgatggaaactggcaaacccctgggatttcctggcaaacccacttagcctatttgaggaatccccagccagtgagagaaactatcatgaaaatgtgctgtggggctggtgagatggttcagcggataggagcacttgactgctcttccgaaggtcctgagttcaaatcccagcaaccacatggtggctcacaaccacccataatgagatctgatgccctcttctggcacatctgaagacagctgcaatgtacttatgcataatagtaaataaatcttagaaaaaaaaaagaaaatgtgctgtgtctgagaaacaacatctgaagtggtgctctggactttacatacatgtgaattctcctctacacacagtaacacacatacacaaacccactcacatgcatgtcaggaaaaagacgacacataagccacactctgaattccataaacgcctgtctggaccccgcattagacccttcagcttgaatatacaagatttcacagatctgtctagtccaggaacttgggtccaatgctgtacagaaacacctagatttttaaaaaattattgtttgatgaatctttgggatgtttttatactagcctgtccctgtgggttgtaaggatgcctgcgttgtgaactattttatgttgggcacaaatgtttttaagtgcagaagaagttaaagcaagagcattgtttgtcttgtggcaccaccgatggtccacagaggcaaatgtcagtgtgcaatcggatgttttcagaagcaccccctgtgtgagtggaggcataaacaactgggaacagatataaacagaagcatgcacaaaggtcattctcccaaaagaggaggcacaaggaatatccatctggcaaagggcattggtccataaccctctgggctaaagttgtcatatgtgatacctgacttattatataagtttctggcttgaccaactactgaaagccactcttctggctttaatataatcttatatcttagtctgtatagaaaaacagcgccttcacatccttccctcttcctcaatcatgtctcataacgtttgtttgtttgtttgttagtttgttttgtttttctctagacaaggtttttctctgtaacagccctggctgtcctggaactcactctgtagaccaggatggccttgaactcagaaatctgcctgcctctgcctcccaagtactgggattaaaggcatgcgccccccccccaccccccagaatgtctctaatttaccagctaatataatcattctcctgagaccagacaggaaacacatagagaaattcttacctttgcagtaaaagaattcctgtgccaggcttgggggtgtagctcagtggcaaagcacttgcctagtgtgtatgagtgcctgggtcccatccccatgcctgcataaaagaaaacatgtcagtcactgtgatttgaaatcaatacaactatttttccagacttattttgaattatatgcagaagtgccgtccaccgcttctagggccgtgccacaagagcttctcacgggagcctccactttctgcttccctacccaccaacttcgtaacaagaactccaagtacccggaggaaagtagtcagaaaatgaattacctgggtccctgaattaccaacagtcagtattctgattggggcttatatgagaaagaagaaatatttacttgtgctggctgggttttccccatgatttatttatttttactcacattacgtccccatctgcagcacaccctcttgttcttggtggtcatcccatggtactggcatctccaaaactgctggggtcttgcactacaattgggctgcactttcaccaataggttctgttcacggtgccaagcctcaacttctctccatgaccccatcaatcttggggcttcatttgctatggaggctgcactttcagcaatggcctctcctggctctcacagtgctaggcgtcagctgctctccatgaactctctacgccttcaaaccagtaccacctgggtgactcttacactgccaagttcagctgatagcgcaaggtacaaacttggctgcctctggaacatagcttttagatttcaccttgacagtgctggtcgtctcctctacctcctcctcctcctcctcctccccctgcttttctttctctcttccttcctttttctttttcttttgccccgtctgtcctggaactcactctgtagaccaggttggcctcaaactcaagagatccacctgcttctgcctccctattgctgggatcaaaggcatggaccacttccacctggcattaagattttttatttttgtggatctgtgtaagtacactatagctgttttcagacacaccagaagagggcatacgatctctatagatggttgtgagctaccatgtggttgctgggatttgaactcaggacctctggaagagcagtcagtgctcttaactgctgagccatctctccagccctctggtctcttctaaatcaccattaatttctcatctacagatgagcagaactgaatatcccagcaagacaaaggattcacttaagcagttgtgctagcttgttaaatcttcagcccctactgaccagaaccatggaatattaattcaaaacaacaaatggccccagtagtgtctttaaacttctccctgtcacttcacaagccaggtctctatcctcggcattgctctcaaaagtctcatcttccaaccttttacagaacagctcatcaagcaatgaacaccctccccaaaacaacatggccagggttgtcacagcaatgccccgctcctaacaccaacttgtctgagttaaggttactatctctgggatggaacaccatgaccaaaagcaacgtgcagaggaaagggctcatttcactcacagttccacgtgataataggtaatcatcaaaagcagtgaggacaggaactcctagggcaggaacctggaggcaggagcagatacagagaccatggagggtgctaattactggattgttcctcatggcttgctcagctgctttctgaaagaatccaggaccaccagcccaggagtggcgccacccacaatgagctgggccctcctcctcaatcactaattaagaaaacgcctcaggagaggcctgcaaaccccaggccagaacaatagaccatcgcccttcccactatcagagaggctctatttagcacctgatgggagcagatacggagacctgcagcgaaaaattaggcacctctggaaaccccagggaagagggggaggacaagttgtagaggtcagagggatcaaggattccagcaggacactgcccacggaatcagtgaagcagggctcataggggctcaaagacaccgaaccaacaaccaggagcctgcatggagtttgctagactctctgcatatgctacggttgtatagcttggtgttctttctcgactcctaacaatgggagcaggggctgtctctgacttttttgcctgcttcagggacccttttcctcctaccgactggcctggtccagccttgatgtgagggtctgtggctagtcttaccgcatcttgttattgcggtgtttagcaggtatccgtggaaggcctgttgtcttctgaagggaaaatgcaggagaagtggatctgggagagaggggattgggaaggggtggagggagggcaaactgcttttgagatgtaatgtaggagagaagaagaaaaaagattgatacaaataactgtcctctaagtacccaagaatagaaacgtaaccatttagagaggggcaaagaaagccttacaggcctgcctacagcctgatcttacggaggcattttctttgctttttgtaattttgctagttatgatagataatgtaaatatttttagagagagagggttgtcaagggggtcataacccgcaggttgagaagtactgttttaagttgctgaactagagagatagatgccttcagtgcttgagtcccagcacccacatctaaaggctcacaaacacttctcactccacctcctggaggatccagtgtcctttcttgcctccttaggcatacacacaggcaaaatccatgaagtatgctgggcatggtggcacatgcctttaatccagcacttgggaggcggaggcagaggcagaggcagaggcagaggcagaggcagagacacatgcatctccgtaagttggaggccagtctggtctacatagttagttccagtacaggtgggactgcatggagagaccctgtctcaacaaataagtaaacaagtagcagaggaagatggcggccgccttagctgttcgtggagcgggatctgcagtggtctttgggcctgaggctctcaccccagactgggaaaactgagaagtctccacagggaccatgatcatggctttgtaatttaatggaggcgtggttctaggagcagactccagaataacactgggttttacatcgccaatcgagtgactgacaagctgacccctatttatgattacatctgctgctgctcaggctcagcagctgataccggagcagtagcagatgctgtcagttaccagcttggtttccacagtattgaactgaacaattctccactagtacacatggctgccaggctctttaaggagatgtgttaccggtgcagagaagatctgatggcaggaatcatcattgtaggctgggaccctcaagaaggagggcaggtgtcctctgtacccatgaagggtatgatggtaagacaatcttttgccaccggagcctccggaagctcatacatctatgactatgttggtgctatccatcctgaaggcacgaccaaggacgaatgtctgcagttcactgccaatgctctctctttggctagaaaacacgaaggctccagtggaggagttatccgcttggcaaccattcaaggatcaggggtagagcggcaggtgctttgaggagaccagatccccaagtttaccactgccactttgtcacctccctgaagcctagatgcaaaagctaataaacagtgttaaagaaaaaaataagtaaacaaatataatttttaaaacaaatggttggctgggtggtggtggcgcatgcctttaaccccagcacttgggagggagaggcaggcagatttctgagttcgaggccagcctggtctacaaagtgagttccaggacagccagggatatacagaaaaaccctgtctcaaaaacaaacaaacaaacaacaaaaaataccaaacaaacaaacaaaaaaccccaaatggttgttaagctgggcagtgctggcacattcctttaatcccagcacttgagaggcagaggcaggtgaatttctgagttcgaggccagcctggtctataaagtgagttccaggacagccagggatatacaaagaaaccctgtctcaaaaaaaaaaaaaaaaaaaaaaaaaaaaaaaaaaaaaaccaaccaaccaaacaaacaaaaaaaccaaatggttattaagctgggcagtgctggcacattcctttaatcccagcactcgggaggcagaggcaggtggatttctgagttcaaggccagcctggtctacagagtgagttccaggacagccagggctacacagagaaaccctgtctcgaaaatccaaaaagaaaaaccaaaacaaacaaaaaacccaaatgactgttgctgttttgtttgtttgtttaagaaagattaactgggcacagtgttgcccagctgctcagaaagctgagacatgaagatcccttgaggccagaagttctaagcagcctggacatgaaagcaaggtcatttttaaaagaaaggaagtgtatcataaagattagatgtggatgcaaagcctaagctatttgcaatcttagcttttataaggtttactgagccccgttgtgcaggaaccgtctctattgttcggctggcgggcatcaccatcctagaatgtttttaggtattattattattttctttagtgtgtgtagatttagatagcccgtgctgagaacatgttctgtgctgagaacatggaggactgaaactggcatttgcaagaggttcagagggtctggctgctggagtatggaactgtcaatctatttgctagtcagtgatgcagaactccagatggattctttctggtctctgccaacaggtccttaggaaacgatgtccttgacatggggagatcaggacaactcggccacctgtgggatttatacttagaagggatggccatctcaaagagtcacagggacaattttccttcctcggtccaccacatgctgtaagtttgatgactcggtggagggggacaggtaggctgagctcccattcaggagacactgtccttcgaaagtccattctggccttggtactagcatctcaattttccaggtaaggaaacaggacagaactgtgacctgtccaagatctaaatctaagtccccgtgtgtgtagtctacagagcagctttacaatgcaaactacctcacgaaagtcgggctttctgacatagtgagcagccccacccctgcctcacctcgtagagactccttccagtccccatttccgctgcagaacattaatagctaacatttggggatgcttcttgaataccatcgcagtggccaccagctcagaaacttatcagcatttactatcacgctcattttggctgccaccagccaaagtctattattagcgtttatctccaactagtcacccgcaggcgcgagttacgtcaacgccaaaagcagctcgggaatctagcttctttgatttgttctcgaatcactgcacaacacaactgatgtggatccgtaggtctcctaggatgactagcctggacttgagactggcagccatagccagtcagaacgaccgcagcggcgaatgcgggggtggggtgtgcgtgcgtgtgtgtggggaggggtggtagcgctaggggcagatccgggtctcgaactagggagtagcaccccacgcaggcgcagtatgannnnnnnnnnnnnnnnnnnngctcagcccaatggaaaagaagggatcaggtgcccggggccacacaggtcgccgggaatttggcggcgtgagcctagggcggagtttgaaaaggaggcagagctcagtgagtagggacggaaggattggccagcgtcggtggctgggcgggagatgggcggaggcttggaaggggctgagggagcctggttaaacggtaggcgtctgggaagggggtggggtctgaaggattctgatcgaaaggggcagtcctcggagcagcggggcacggggaaagctcggggcgagatctgcgcgagtggaaggcgctggttcggccctgcaggaggtggagttgagtgagtctttaaaggtgctgccgaggccgcggcagcccggtctggcggactagaaaggtgggtgatttttctggggaaataggctgaagcgggcaggttgcagaagccaagcgttccgggcgcagattagaggtatgaaaggatgtgggaagtggatggggggggggcggtgattgggtagggcaggcctaagaagagcctgattgagcctggggttacctcgtttagtgaataggcaaaatgaggaaagagaatcggataaaagcagcgaggtccagggggaccggacaggaccaggtttcctctagcagaagatggcctggggggtgggggcggtttagaaggctcgggaatggacccggtgaaggctgcgatctagactagggggcggggccgaggaagggacagggatgtggggtcctctggacactccagctgcctcaccaactacacctttgctagagcctttccaggagctgaggctcttcagccatgacctccaccggccaagattcttctactagacagcgaaagagtaggcacaatccccagtcaccccttcaggaatccagcgccaccttggtgaggccccagacctgccctgatggggggggggggtggagggtgaagccagccagccatgtccagactctgatttttctgtctgattggcagaagcgtggtggaaagaagtgtgctgtaccccactccagccccaatgctagcggaggtaaagaagaaaggcaaaatgaagaagctgagccaaccannnnnnnnnnnnnnnnnnnnnnnnnnnnnnnnnnnnnnnnnnnnnnnnnnnnnnnnnnnnnnnnnnnnnnnnnnnnnnnnnnnnnnnnnnnnnnnnnnnnnnnnnnnnnnnnnnnnnnnnnnnnnnnnnnnnnnnnnnnnnnnnnnnnnnnnnnnnnnnnnnnnnnnnnnnnnnnnnnnnnnnnnnnnnnnnnnnnnnnnnnnnnnnnnnnnnnnnnnnnnnnnnnnnnnnnnnnnnnnnnnnnnnnnnnnnnnnnnnnnnnnnnnnnnnnnnnnnnnnnnnnnnnnnnnnnnnnnnnnnnnnnnnnnnnnnnnnnnnnctgcttctagcctgtagtctggaagcaggtgatttagggagatggggatcattcttgaaagatttctctgttaagccaataaacagttatcaagagtctcctgtgtgccgagacttagtgatagatgtgagcaatagaaaagtcccttctccgctggccggtgagtgtgcagggagatcattaaacccccaacagcggtataaactgttcaatgaagaccaaatgactgggcactccaggtctctgtagcctaggcagcctggaactcactatgtagtctatgtcagcctcaaacctttgataagcctcctgtcttagcctctcgagtgctcagatttcccaaacgagccactacacttggctagacgttagattgttagagggtcctcgcctaactagcaggagccgtccttgagaaggagacatgtatgctgaaaaaacctcttatttgcgctctacttcttaaagaaatctgtttattctttttggccctatctttaaaatagattcgctatctgacttcttccccctggtcccctgcttccagccttcgcattaaagcctaaaaaatacatttgagatgacgtttccttcctttcttaaaatacttcaaggccagaactttgctcttaaggtaaagtcggcattctttagactggcctctaaggttgcacaggatttggcctttgtgacctgttcagccaggcctctcctcacgagctccaggtcacttaacgcacgctggccaccttctcgtctttcagtgtgccagtcaccctctcgccttgggtctttacccttgactgattcctctttgaactttcacaactatggagactcacagaagcctttgactggccactacctctctcacatctgttcttagctattttactagcctctgccattgtctgttaatcattacactgatatttgcaaatatagtagccgtcttcccccatcccgacctaaaactaactcatgatgtcaagaggctttctttatggtacatttgttgaggctatagccgtaaacaaagctgccttcaaaagtaaccaagaggtgacctctccagtgttagagtggaggagctcaggtgggagggagagtgaggtttgactggaaggggtgcttccctttggaatacaatagctagggggtattgctaacatttgagcaaagatacagagggttggaggaggctaaaggactgagccgtgagtcatcactgaaaagacttccaggcgtgagagaccgttgaagtcctcaggcctagctgaagacaatgtggtttcgttgaagagcaaggaacacattgcagggaaacaaggtgaaagaggaggggtgtggtaagaaagacagagtcagaatagggatgggaacagattcgggttttcttaggcccttctcggtgtgatgagaagtttggcttctaccgggaacatagtcggagctacaaaagggttttgagtagtagaattctaaccactggctggctcagtatacaggaggggctgttgggggaataagtatagaagcagagaggggttctcataaagatgatggagcagacagctcagactggaggttccaacagcgtgaatggtagcggagaaaacaagtataaagacttcagaaatgacaaagaaaggctgatgttgccggtaaggggtgagcagctatgggggtgaggggcggagatgggacaagagcagacatgctccctagcacttttgcctatctgtgtgtatgcgtgattccatccactcctgcagcttccctgaaagccctgagcggctccatgccatcagagagcaactgatcctggagggcctcctgggccgctgtgtgtcctttcaggtgactcctccacagccttcggatggtgggtgcgggcctgcgaggacctaggcctggcctggcttctagccccccttttttttccttgtgcctccccaggcccggttcgctgagaaggaggagctgatgttggttcacaggtgaaaacttaggagcttggtagggtggggaggaggatacccaggctcaaccaggacagactgaaggaatcccatagactctgtggccagccttgggcacgtccctgagcctctctgaatatgttattgctttaaacaaaaaacaaaaaacaaaaacaaaaaaaaaacacaaacccctaagttccagacaagtatgatggtacatgtcatcacttgggacatgaagacaagcgaatcaggaaatcaagacagcctcagcgacatagcaggtttaacttgggtttatgagaccctgtctgaaaaagccaatcccgaaagaaaaagaaatcttaagtccttcaggagggtcagtgtgtgtatcaggtacctgacagcatcttaagcctgtgaagggctcgtgttattataatctggttcgttaactgatggcagatacttgccagaatgatcagaatgagtcctgggggagtctagaaactcaaaggaagaggcctggtacaatgtggctcacagaataactagcctcgcagagagaatatctgagctgagttccaagaggcaaaaaggtgggtgagtccagcaaagagaagggcagaggaaagggagaatcaacagaactcttaactatctagtcagaggcctagaatttcaagttaatggctgtctcgaggaactaaatatataactagagatgggagaggctagagaagaaaaagggactacagcctgcaccccagctgaaccccctaggttgactatggaggcccgacttaatgcgaggtctgtctgcggagggaccagggctgtaaaatctttcctctatcttgtgtccccagcctggaatacattgatctgatggagacaacccagtacatgaatgaaggggagcttcgagtactggcagaaacctatgattcagtgtatctgcatccggtatggatgagaactgtggggtcagggtgtggcagcaagtcttgggtgtctaccgtatccatgccaacctcactgtgggaatgaagagctaaatagttagggccatgctttctctctctctctaactctttctctctggttttccacggtccccagaactcatattcctgtgcctgcctggctacaggctctgtcctccggctggtagatgcactcatgggggctgagattcggaatggcatggccgtcatcaggtaggactctgaagcgttgggcatcttacatttttttaaaaagcatttccacatagtggtgcgtggaggtgcatgtctgtaataccagtacttatgagatggatgttaaaggaatgctcggggggttcagggctagcctcagctatataaatttgaggcgagcctgggctatctaagacaccttctcaaaaaaaaaaaaaaagccctacaaatgtgaaatgtgttaactcaggtaccctgtcttcaagtggttgaagagtcaagtggtacaaaaagggggttcaataaaattctctctcctctttgttgatggacccctgaaaggtgctcattgtcaccagtaacttccgtgtccttccacagatggttttactcagttagtaagtaataagtatcccagttcatggcttcagggacatgtatttcttttctatctggaacatcttgaaattcagatgcagcgaacagtgcgtgacatctcaagcctcagcctgtgcctttcactgtttcattgttgcccatggaaggtcagaacattgggccacagctgacttcctagaactgataaaaatgcagaagatagcctttgtcctcctcagcccctttttgtaagcacatgacagcactcctttccgtaccgtgcatttaaaaaaaaaaaaacccttggacatctttatctttgaaagctgtctcttaacagtatatgggttacactcgtgtgagatgccattgtgcaagcatacttttaagctagtcacccccttgctggtgggaattttggttctcttcaggctttgatagcatacaccagtggtacatttctaaagatagcactttttattatataggtctcagctaagcctatgtagcaaaatgactgggtattaaagagtatgctttcatactcttatggatagcttaattgatttttattttttgagactggagcttgctatacattctaggcaggccttgaactatcgatcctcctgcttcaaattctttctgagtgttagtattgcgggcatgtgccacaatagcaaatatgggtgagggtacctttggatggttatgtttaaatctccttggttgagagagtgttggcttgggggcagtgaagcttcaaaagccacagttactcagttgctggcagacttatagaatctctctaggaagaattgggaacacaggagagtccacctctggagaggaagactcccaaacctgtagctttccctttcctgcttaggcctcctggacaccatgctcagcacaatcttatggatgggtattgcatgttcaaccatctggctgtggctgcccgctatgcgcaaaagaagcaccgcattcagaggttggtagccagtgacagacggaacgtgggtagcatggaatagggggtgctgtggtctaggttgttcctctgtgtttcacttagccccctgcacagagctcccctctctcctgctcacagggttctcatcgtggactgggatgtgcaccatggtcaaggaacacagttcatcttcgaccaggaccccaggtacatcccatgtctcaccctaagtactggattcttaaccatcaggcccagccacaggggctaggaagccatttacattcagttgtcctggaaccaggaagtggatgcttttccttgttgtctactgtctcctaatttcactctaaagcggaaactgtggccttcccatttcacacatggtcaaacaaccttacaggttccagtgtcaggcagagaagtgaaagatgtggggtttgacttagtgttggagagcttgttcagcaatttacccctgagctggaagggacctcagattagtgctttgtctttttcaattatgacaacatttcaaactattctgaaaaattagtcgggtggcaaggtggctcagcaggttaaagttcttgcctgacaactagagtttgatccccaggacccacatggtggaatgagagagaagaaactcctgcaggttgtcttctgacctccacatatacataccatagcatgcacgtatcccctcatctgtaaagagttgggcatgctggagcatatacctttaatcccagaacttgagaggccaaggcagatggattcctgtgacaaggccagcctgctctatggattgagataacgggccctacacagagaaaccctgtctcaaagaacaagcaaacaaaaaaggctgtagagtatttccttgcattcctcctgaacactagccatgcacatggtgcagacatatagagaggcaaaatagcatagacataaattttttaaaaaattaaaaagaaacttatttgtaaaaagccatgtagaagccaggcttggtggcgcacgcctttaatcccagcacttgggaggcagaggcaggcggatttctgagttcaaggccagtctggtctacaaagtgagttccaggacagccagggctatacagagaaaccctgtctcaaaaaagcaaaaaaaaaaaaaaaaaagccatgtagaactggggacgtagcccagttggaagaatgcatgtggccctaggttttatctctagtgttgtataaaccaggccttgtggcctgtgatctaatcccagcacacaggaggtagagttaataggagcaggaaggaattcaaagttaatttaaaaaaataataaaaaaaagagaagacctagactagcccttaggaccgaggatttagagcaggaagtcagaactggaaagagagaaggaaaataaagttaaaattgcaagagtaaagtgagtcaccctaagatgaaccttcaccttaaaaatgtgtagcaaagaaacagaaaaggtctgtttagaggaggcagatgtagaaaagggcttacgcccctggcatccaggagaggcagagttgagactgcaatgactgaacctccagcataaaggaagtatcttaacatatgagcacagattgagaattagaaaaatgtatgagatagggctggagagatagctcagtggttaagagcactggctgatcttccagagctcctcagttcagttcccagtgaccacaaccatctgtaatgggatcccatggcctcttctggttcgtctgaagacagctacagtgtgctcatatccatagataaaataagtaaatacattcttttaaaaaaaggaaacctgatgagaatgacttgagtagctgggaagaacaacttgtagaatgaagccccgcagctgtaggttgagagtcgtacatttgactctttagttcccatgttcttttctatgccagggattgggttaacacaagctaggcaatccctcaacctttgttttctctgcctctagtgtcctttatttctccatccaccgatatgaacatggtcgcttctggccccaccttaaggcttctaactggtccactataggttttggccaaggccaaggatataccatcaatgtaccttggaaccaggtcagtgtctgcccatgtcaagtgagcctagccaccttcccacaggctcaagaaaggtgactgacaattgcatcccgcttttgtgtctgcagacgggcatgcgggacgctgactacattgctgctttcctgcacatcctgctgccagttgcctcggaggtctcgcagatctgggctattgggggtgagggagtgacactgtggggtgatccctgaaagcaggtgttcacacataggatgtctccttcctcagtttcagcctcaactggtcttggtggccgctggatttgatgccctccacggagaccccaaggtagggcaggttctctggggtgttagaccaaggggactacactgagctttatgtcactcttctgtcccttcagggagagatggctgccacgccagcaggatttgcccacctaacccatttgctcatgggtttggcaggaggcaagttgattctgtccctggaggtaagtaactcactgttacctaatgctgggcttaggatatttgtatgtgtttatctggtgtgcgtgcgtgtgcgtgtgcacagtatgcatatggtcagaagacagcatgtggggttggctctcccctttcacggtgtagattcctttgagggattgaagtcaggcttgctggcaaggcctcttatgctccgatccatctcactggccacatgaagggtgaagggcagatctttttggccttggggatagaattaaaatgtagaatacttagctaatgtactgcaagggcttccattctcaggaccactaaaaacacgagctttcatgaatgtaaggagttccttggggctacaggggtggctcagttgttgagagcacttgctgctcttatagaggacctgggtttgattgctagcatggtggcttacagactccagttcaggagatcccacaggctcacacatgaggcccatgcatatacatatatgtatacattacacggaggtaaaaacttcataaagtaaataattctttaaaaaaaaaataatgggattttttttaggatttatttctatttctatgagtacactgtagctatcttcagacaccccagaagagggtgtaagatcccattagagatggttgtgaaccaccatgtggttgctgggaattgaactcgggacctctgggaaagcagccactgctcttaacctctgagccatctctccagcctgggatttatttttaaaactgatgttcttggctcagctttaccagttcatgaagtctttgtgcctctgcttccccttatagtaagtaggcaacgtgctaatggtaatcactttccgtgaatcgacatttcttgttgcttgacatagtatgcacctgaacattgttactcttctcagcatcttcccctctgcttgcctcccccaacaactccttccccagggtggctataacctccgtgccctggctaagggagtcagtgcttcactccacacccttcttggagacccttgccccatgctggagtcctgtgttgtaccttgtgcaaggtgagcctgggggggggaccaggggaaaggagagcccttactgcctgctgggaggggcactttagtcacatttctgttttctccatccccagcgcccagacttccatctactgcactctagaagcccttgaacccttctgggaggtcctggagagatcaggtaggtggcggggcgtgggggggggtgatcagcactagacctggaatgagctattagaggctattttcttccagctctcctcttgttttcccgggatgcctcggtgggaagggctgtgtggattttaggttttatgtccaggccatgttttgtctcaagagtgtaatgggatccagattcaggaaataaggtgatctgagtacccccttttcagttgagacccaggaggaagatgaagtggaagaagccgtgctagaagaggaggaggaggaaggtggctgggaggccactgcactgcccatggatacatggccactgctccagaaccgcactgggctggtctatgatgagaagatgatgagtcactgcaacctctgggacaagtgtgtgctcagagggctggggtgggtggtgtttgggtcactctcctcagtcactaaacccttggctctgcttctccacactgttagtcatcaccctgagacacctcagcgcatcttacgcatcatgtgtcacctggaggaggtgggccttgcggctcgctgtctcatcctacctgctcggcctgccctggactctgagctccttacctgccacaggtcagaccccgtgctggggggaggccggctgtaggattctagggatgttccaggagtagggcctagggctctccaagatgggtggagccacctagacaggttcaagttcttatgtgaggacaagctggcgactcttgttcctctgcatcaccagtgctgagtacgtggagcatctccgcaccacagaaaagatgaaaacccgggatctgcaccgtgaaggtgccaactttgactccatctacatctgccccagcacctttgcctgcgcaaagcttgccacaggcgctgcctgccgcctggtggaagctgtgctctcgggagaggtgcgtcttctctgtgtgctagtgaagtttagctgaagaaatgaggtcctgggaacatagagagggactacctgctcccactcaggaggccagaggcaataggagagtctgctgggaggggaaccacggagtggatggccgagtggatggcggacaggagaaagggaagcctgggaaagatgaaaagagagtgagggccagaggcagtctcgctgctcctccctacaggttctaaatggcattgcagtagtgcgccctccaggacaccacgcggagccaaatgctgcctgtggtttctgctttttcaactcagtagctgtagctgctcgccatgcccagatcattgctggacgtgccctgcggtaaggcctgcccccccagagacccccaaaacccgatctttgcagggatctggctactctttccattcagtcttacttggcagacccatggtcacccctgggagcttacacagaaacaagcaaaggtccactgggcagcacttgactacaaaagccccaggacgggtgtgttaagtgccatggcatctagatgcttaataaactaggatccagggtatcacaccagcattcctgaacaggttatcccaacagaacccatgcctgggctcctagcattagaagagtccctagccttaattacttgttcaggtccatagttcaggaagccaaggttggaccttcattcttagaataatagcagtgctttctcattaactccatggtcctgttgcccagcaacaagtgcttccaaagaccctagaaatctagcagtggcccactcctaggccttactgtcccaaggtgctaaaaagggctatctccctccccaggatcctaatcgtggattgggatgttcatcatggtaatggaactcagcacatatttgaggatgaccctaggtgagtgatgggactgtgggtaagagtatggtgtgagaggatgctgaagcatcctgcagggatgttcatagcctctaacctgctgtggcccctttctcatcccaccctctccctggcagtgtattatacgtgtccctgcaccggtatgaccgtggcactttcttccccatgggggatgagggtgccagtagccaagtaggccgagatgcaggtataggcttcactgtcaatgtgccctggaatgggccccgcatgggtgatgctgattacctggctgcatggcatcgtctggtacttcccatcgcctatgaggtaaggctcaggttattatataacattgctgtatctggcagcacacatctgcctccttgacgtgtgttttgactaccaggtgactaatcctatgatggctattgggacagggtggtggggatggccttatgtatctgtctgcctatgcatatatgggtgcctgtgagtggcctatctctgtgacattttacacgtaaacaactgtcttggctctgtgtatatatgcatgtgtgtgccttctgattctgtctgctcttctgagtgcatggctgtaagggtatccctaagagatactgttgtggaattgtgtagaatagaagcataagattaaatacattatggatatgtctatgtaatgttatatagtggctgtcatctcctttctgtgtgtgataagtgtgatagtgtatgtcattaaatgctgctgtcttgtgatagcctaagaaagactctgaatatggaaggccgtagtgacattgtcacccacacccgtctaactgggtccacgtgtctatatatgaatctcgctggctgctttgactcaggggtgacctagctgtgtgtgagctaaggacagggccaatggcgtgtgtgtgtgtgtgtgtgtgtgtgtgtgtgtgtgtgtgtgtgtgtgataatgcactgaggacacaactctgcaagcctgaacatcgggctctgcttttacatctgcatgcatgtgactatgcacaggcgacagaggctaccctttatgtgtatgtgtaactgcatgcaagcgatagcctgctgtgggcattgtaactgtgcatctttgtgactgtgcaggggtggctgtgtattatcgtcccatgagaaacccaagcgtaagtggtgggatttgcagccctatcaatatgaacctgtctggttgggagtggaagtgtatgacacttttatttgtctatagtctgtgtataaaagcctgtatcatgtgaatgtgggtcccgtatttgacccttgtatgtgagagagaggttatgtctctgtttctcttgtcactatctcctgccttccaagtctccatgttctttctgtgagccatatctatgtcataactctatatcttgccttctgtcaacttagagtatctcccaagagatttttgcccatatatgtgtgtgtgtgtgtgtgtgtgtgtgtgtgtgtgtgtgtgtnnnnnnnnnnnnnnnnnnnnnnnnnnnnnnnnnnnnnnnnnnnnnnnnnnnnnnnnnnnnnnnnnnnnnnnnnnnnnnnnnnnnnnnnnnnnnnnnnnnnnnnnnnnnnnnnnnnnnnnnnnnnnnnnnnnnnnnnnnnnnnnnnnnnnnnnnnnnnnnnnnnnnnnnnnnnnnnnnnnnnnnnnnnnnnnnnnnnnnnnnnnnnnnnnnnnnnnnnnnnnnnnnnnnnnnnnnnnnnnnnnnnnnnnnnnnnnnnnnnnnnnnnnnnnnnnnnnnnnnnnnnnnnnnnnnnnnnnnnnnnnnnnnnnnnnnnnnnnnnnnnnnnnnnnnnnnnnnnnnnnnnnnnnnnnnnnnnnnnnnnnnnnnnnnnnnnnnnnnnnnnnnnnnnnnnnnnnnnnnnnnnnnnnnnnnnnnnnnnnnnnnnnnnnnnnnnnnnnnnnnnnnnnnnnnnnnnnnnnnnnnnnnnnnnnnnnnnnnnnnnnnnnnnnnnnnnnnnnnnnnnnnnnnnnnnnnnnntggtgctgatctcatctggctttgatgctgcacaaggggatccgctggggggctgccaagtaacaccggagggttatgcccacctcacccacctactgatgggccttgctggtggccgtattattcttattctagaggtaactcttttgatgtcccttccatggtgggagggccatttggaagagttggctatatcacttaggacagttgctaaaatctcctttgaatatacctgggatagttgcccaaatgagatttttttttcgagtacagggtttctctgtgtagccctggctgtcttggaactcactctgtagaccaggctggcctcgaactcagaaatgcgcctgcctctgcatcccgagtgctgggattaaaggcgtgcgccaccacgcccggctcccaaatgagattttaataaggatagtagcaggattagaccctttgctgagcccttactatatacaaaatagcttctctggactttcttctgtcttctacaatttctcgacaaaatagcactgtgaggtaaagtctgtttaactcattttcctctcaagatcaactagctgggtgcagtggcacacacctataatcccagcacttgggaggaagaggaggaggcaggaggagcagggttgccctcagctacataccaagtttgaggccagcctgggctacatgaagccctgtttcaaaaagccttcccccatcaaaacaaatcagggggttgaggaacagtaagtagcctgagatcacacatttaataatggcagaactgagtctggtttccaccatcttccaaattgctgctaatgggttagagagacaaagtattcactgaccttctgtaagggatgggtactccctccccttatacatgtgttttctgagcctacagatggccctagctaatcacggaggcattcctggtctctaaaaatgccctgtcacagtgtgcactgtaaaaataccctgtcttcctactgttccatctttcagacatgaacttaaccctcagcgagcttgggtgccattttcatagacaaggacaataagtcacagagaaactcacgggcttacaagacatcctcctagccgggcgtggtagcacacacctttaatcccagtactcaggaggcagaggcaggtggatttctgagttcaaggccagtctggtctacagagtgagttccaggacagccagggctacatagagaaaccctgtcttgaaaaaaggaaaaagaaagaaaaagaaatcctccttacagtttgcccaggattgcttatggaaggctaagggttgtggttaagaccatcaaccagttcaatgaagaaccagtcattcagtggcagaacttgtatggcacgcagggcctaggatcagttccatggtaatgctagcaacaacacagactattttgtcggcccaggttcaaataccagcactgcttcctcaactcttgggacctcagacaagtcatctcctgctctgactgagccttggtctccttacatgtaaaatgagtggaaacaggtctctagcaagtatgaagaaagtcaagttaggggatcatacagagagagtactagttgttcctatcccaggtcacaacagggccttttgggatctgccttgagctttggtatgggtcagattagtgctttctatactgtgaggccaggggggcccttggacatggaaagacagatctgtacccactgaacacctgtcattgtgaggactgtgttgacatgcataaaggatttaaaataaggtcaggttcatagcaagcaataaatgtgagctatcctttattaatactctgatctgtactgccattgttaccttgcacgtgacagccaccaatttacattcccccccaaagccacctcacacagtgactactgcgcttcttacaaatgtgttgcagtcatttgttcctggtactagcctgcactctggactttgagtgccctagacaaaggggaactaattggagagtcaggatatctaaccctccaaattccctgatgactcgtcatggaacccattcctctcctttacaaagggtggatacaatttggcatctatctctgagtctatggctgcctgcacccattccctccttggagacccaccaccccagcttactttgctgcgaccgccacagtcaggagccctggtttcaatcagtgaggtcatccaagtccatcgcaaatactggcgcagtttgcggttgatgagtaagtagacctgagatgagggaactcaaagaataggggtggggggttaagaggtcagaaagggggcggcagccacacttacacgtctttcccattgttccagaaatggaagacaaggaagaatgctctagttctaggcttgtcatcaagaagttgcccccaacagccagtcctgtatcagctaaggaaatgaccacaccgaaaggaaaggttcctgaagaaagcgtgaggaagaccatagcagcactacctgggaaagagtctactctaggccaggctaaatcaaagatggctaaggctgtgcttgctcagggccagtcctcagaacaagctgctaagggaactacactggatctggctacctcaaaggagactgtgggaggagccacgacggacctgtgggcctcagcagctgctcctgaaaacttccctaaccagaccacctctgtggaggctttgggagaaactgagccaacgcctccagcctcgcatacaaacaagcagaccacaggggcttcacctctgcagggagtcacggctcagcagtccctacagcttggggttctcagcactttggagctaagcagagaagcagaggtaaagtccaccacatctgggaaggaggtagaagggctaaggactgggctttctcagatacatcttttccttctgtgtctccaggaagcccatgattctgaggagggcctgctaggggaagccgctggaggtcaggacatgaacagcttgatgctgacacaaggatttggggactttaatacccaggtgaactcagggagctagggctatgactattgcttcttggccattcctgccttcagggaggagcagatgatgtataacgggaagacgaaatcctttccttaccccatttttctgccccctctaggatgtattttatgctgtgaccccactatcctggtgtccccatttgatggcagtatgccccattcctgcagcaggcctagatgtgtcccaaccttgtaagacctgtggaacagtccaggagaactgggtgtgtctgacttgctatcaggtatggaacagaagaggggtattgggtagagattgggcccagcagcaaacttcagctggtgccaagcgacctgtgacaatcactttccaacctcaggtgtactgcagtcgctatgtcaatgcccatatggtctgccaccatgaagcctctgaacacccgctggtcctcagctgtgttgacctgtctacctggtgttatgtctgtcaggcttatgtccaccacgaggtgagcctggcaagttgcttaacccgtgcacactgagccctgtcccccgtcccctgtatcccttctaccatttggtaaggggagaacactattttgcatggctgccccatagatatttgcaggagggtatagggtagtctaggagaagcagtagttgaaagctgctgctaccatggtgacagcctctctctggctgaaatagagccaccctcactttgacctaccttgtccttcctttgtcctcaggatctccaagatgtgaagaacgctgcccaccagaacaagtttggggaggacatgccccactcacactaaatcccagaccacactgcctgtttcccttctgaggccacaggcagggcagcttagttcaccgcagtccgtaccttggataaggggcctcacttgaacccatcttgaataccctttgccaggtgcttatttaagtacaaatccttttcaaaggactctagtgttcagttgttgatgtgcccctgcccactgcctgctcgaggaatacctctgttctacccagaaggagggagggacagcttagtagccctaggaaggagctgagatcacaaggatgacattgaaggagacaacggggcagtggcagcaggtcagcatatttaataaagttggagttgctacaaaacctgaagaaagtgctttttttttttattttgaaaaacccgtcattcctagccagcacaactgagggaagaaagggaggagagaagaaaggagaggtcttcatcaattcaactctatccattgccccccccaaaaaaaacaatttaactaaaattgaagtaggcagccagattggctctgctggagagtaaatagaattcgtgagcaaatgagtgcccagcatagaactaggaggctcaccagacatgatggtgcgtgtgccctttatccccaaacttggaagacaaaggcagttggagttcaaggccagcctggtcagttctaggctagtcagaagtacttagtaaaaagacatgagaactgtcaggatgtagcctcctgggcctgtttccccatcgacctcactgactgtttggggagggtgaggaaaggaagggttcaaatttaacttcaaggtctagtggctatgggtggcagccggagcaaaactgcagtgcctctaaccagagttagagaactggagagctttgctggaattctattccacatcatgaaaattgctttggctgattagggattttgttgattgccactttctcatcccagagattcacctactcaaaaagaaggagggcatctccccaccctttacatagggtcccatataaatcaggccaactttaaactcggaccttgtacatccttttttgtatgagtgttttgtctgcgtgtgtgtatttgcaccatatacatgtcgaaagccacggaggcgagaagaggatgacagatcctctgaagctggagtagacacctagcctggatcccctggaagagcaagtgctcttaaccattgaaccagctctccagccctgcccttgcacttctcacccacttccctagcgctgggattgcagctaggtgctacttcatacattttaggcagtgcctgcatagcaagcactaccaatgtctaaacccagtccagtccctttgggaaacatgacagatgctccagtttacatttcattgctcagaattctagcctgtgattgtcatagctgcaagagagtctgagggatttataacgtgcacttctgcttcagataagttctttctgacctcaaaaaaacaaaaaaacaacaaaaaaaaaaacccttcctttgcaaatgtttcccttcagaatgcacccaatctaccccgtagatacccagaaacccagctgaagttgtataaattccctggatcaaaaaatacaaaatggtttccaaaatgtggccttccagatcaaatcctgacacagcaccatacactccaaagtgggggtcttccaagttaaatcctgacacagtgctacacacaaatggcccaagcggaaccaaccctactgcagttcaggcgaaggaggggcggggcagaggggggtgtgctgtgtagagaggggcaggtggaggtcccgcccacatttgctcttacattgtgcgatgggtgaggggaaaagcagcggggtgggggtggggggtcaggggtcgggcaggtgggagggggaagctcacatctccgccctctgctgcctctgggggtagggagcatcctaacccccaactgtccggtcagatccgcctactgcccctcatcagactgctactcctgggagcacaggtaagcagggctctggcgttccttagatcagacatctttctcagcgcgggattccagggacaggggctccgccttccccatccctgcctcatgaggggagtgagccttgcactcggttcacttaactgagtgctagcgctgagcgggaagcggactttcttgaggtaggaaggagcactagggccaccggtctaacttgagtctgaagtggaacacaggaacaggttagggttacccttccccttctccaaccccgagctttacacctgactctgacacggaaaaccacagagaccaggcgagttgtccaagctaaccccaaggaagctacagggtctcttatttggagcgactccgtacccttccctctctctttgaccctatgtgcccagcctgcttctgtgtgccttcctgggctcctgccttcctgggtcagagatgcaagtccagaagactgattcaagctgctcaaagctcaaagccgctcaaaacctcaagctcccttgagctctttgggggtgctccacataggggttctgtaactcgagcagaaagctgaggtgccttttgtggtgtctgtaccatgcccgcctgaagccggtcccggtttagtgtggccataccgaggactcactcagcctctccttaaccgccagtaccctagggaggcgaccttcttatatttatccccacctcccatcatagcattccccagatttgctgctgctctcctcccaaatttaagagtcctttcgatcttgaaagggagctgttcgcttccagagtatatcggaatctgacctctctctccttttcaccggctctactgccaccctcgacccgcccttggattctttcactacccggggcctcctcactgaggtcatcccagttctttctctgatcgagcctccacagactcttccctgtcgatgtccccaaactctgaggtactccaaagttctattctctggccgcttctctcctcacccttgtgcgggcaagcactctcggaggccctttcagaggatccctccacctgagaccttcccccaacccccgccacgcctcactatccaaaacactgccgaatctcctcgggacccctggaacccactacctgcccctgaactgcggctcctccctccgagccccttcccttttctagtgaaaacaggatatggaggtgcattcagtgagttaatgacttgctagtaatagctaacacaaattgagcacctgctgtgtgccgaaccctcttttactatgcaagataatttgcttacttatcatatttattgtctctcttttcaaccagaatctcttttgaaggcctctggagttgagtctgttttgttctgggctgcatacagggagagtttttagaaagttagctaagattaaataataaaatacccaattttgagaacttgttatctggtgccaaacaatgtgagattatagagtgtggaatagaacataaaatgtagaacaaagcgatcggttcacagcagttgcgactagttttgttgggggcagggttgttttgaggttttagttgctattgttgggtttttttgggttttttttttttttttttttttagtaaaggtctctctcagtatgtagccctggctggcctgcaacccacagagattcacctacctctgctggaataaacctgtgcatgaccttggaacttagcaaaagaacttaggttattataatcgttattatcattattatatttaatattttaatttatttcgtatctttatcattattacccactgagccatcttgctggccccatgcctgatgttaagtcagactaaggattgaaaccggaactccatgcaggctagagaagcggtctagataaaccccacacctccagtcttgctttaccttttgtgtatctccatgtccctgctcggaagaggtggttactagactgtctgatttgttttgccttttcccccccctttgagataggatctggcttccaacttgttacataaccaagggtgaccttgaacttctgatctttcctccctgacttgaatcctggaactatagatgtgagctaccctgctgtttttgaggcgctgagagtcgaactcagggctccatgcatgcatcttcagccttgatctattatctttctacgtaattcttttaggacataaaccccttgggtgggaaagttccaagcagccaatcaccagacaggcgctactgtgccaagttggagttcagaaaccaaatctcactctccttgtgcagtggagatgctaagggacttagagatacttttccaggagataatgatgtttaaaaatttaaaaacttcctccaattcggctatagtgatagttactatagccgaacatccacagttcaccgaatcacacatcctaaaagggtggacttcataggattcatgttcatatcaatgggagcacttgaaaaatcccaggacaggcaagatggttcagagataaaggtgtttgccaccaaacccgactcccctactcccatagcttgtcctttgacctacatacaaatgctatggcacgcttacaccaccccacccctggaagggttaagttgccctcatcaacccaaacctaaccctcccctatgcaaaataaatgcaatttagaagttatttgacaagccgggcagttggtggtgcacgcctttaaccccagcacttgggaggcagaggcaggcggatttctgagttcgaggccagcctggtctacagagtgagttccagaacagccagggctatacagagaaaccctgtctcaaaaaaaacaaaacaaaacaaaaaccctaacagttatttgtcatttaaaaagcatgcgtgaaaaaaaatagccctgcttggtgctgaagaagtagcttaacactagagactgggggtttgatcgctaggcttgtcaaaggaaaaactgccctctagctctataggaaagaagagggtagcgaggcttggtggcacacacctgtaattctagctctgggaaggcagaagcagggggattgctgaaactttaaggtcagctgacctgcaggacaagttccaagcaaggcagagatccgggttaggaccttgtctatccccccaccccccacccccaccaccaaagtaaggagagaagagtttttaacttaaccatgttgattcagcggcacctggggagtctcctttcttccagccagtctcacctgatttctccttcacagcacctgctctttacacctcttccttgagctgctggggaatggctttgcctacaaagtctagcatcttggacctgagctccggcaccccatgcaccagatctccagaggaaagtcacgaggcttgggcacagtgcaaagatgctggcaggcagctacccgagtacaaggcagtggtggtgggtgcaagtggtgttggtaaaagtgctctcaccatccagatgactcaccaatgcttcgtgaaagaccatgaccccactatccaagattcctactggaaggaagtggccagggacaacggaggctacattctaaatgttctggatacatctgggcaggatattcaccgggctctgcgtgaccagtgcttggcatctggtgatggtgtgctgggcgtctttgctcttgacgacccctcgtctctggaccagttgcagcagatatggtccacctggacccctcaccacaagcagcctctggtactagtgggcaacaagtgtgacctggtgaccactgctggagatgctcatgctgccgcagccctccttgctcacaagttgggggcccccttggtgaagacctcagccaagacgcggcaaggtgtggaggaagcctttgccctgcttgtccatgagattcagagggcccaggaggctgtggccgaatcaagcaagaagacccgacaccagaaagccgtgtgtagctgtggctgctctgtagcctgaagatctttgtctagcaaattgacccttgtctcatgtcaaggtgacaattctcttgtaataagatttccctctccgaccaagttaccacagacatctttttattgtcatttggtgagaagttacgtggtaacatgggacatccctcattgactgtgttttatgaaactctatgcaaaattaaataaatgttctcaggattcaaagcttcctttatactaaatctttgtttttcttttcttcttgccttttctggagacaggttcttactatgtagccccgctggaagttcaagagatcttccaggatagccagagctacaatagtgagactgcttccaaaaggaagacaaagttgaaaactcagcagttaggatttttttttttaaatagagtttctccatgtaactctcctggaactcactttgtagattagtctggcctttaaggcacagagatttacctgccactgcctccagtgtgctgggattaaaaagacatataccaccgggcccaacagcagttaagaatatttttaaaaagaaggagccaagtgtggcagtcacctttaatcccagctctcagggaagcaggcagatgaatctctgagtttgaggctagcctggtgtaccgagtgagtttcaggacaaccaggattacatagtaagactgggtatcaatttttttttaataggaaaaaaaaaagccttgagaaactgcccaaccgtgctttggatacacctcaaaacaaacaaaacaacctccttccttgtccaacacaagacagtgacaggaagggtaagaaaggactatgaagtgcaaaaacttgcacatactgagaatagaacaagtggccagggcaaaggcaatggttggagtgaatattcagagccccgtgtaagcagtgcttggcagttgctgatacagtgctggatgtctgtgatccacctggggccctcacaacaagcctggtcctggcagaccacgagtgaatccatagccccttggctaagtgctgtggacccctggcagacgctgaaagtaacctcagagcctcccagggaacccgcctcagtgaagcctagaagggtagcccaggcacccggtgagacccgcaaagtccagaggaagcaggcatgtattccttaccagtacaggtcccaaacagtactgtgctgtcctcagtaggacagccactattccattatcattgtcacccagcccaccggccccctagtacagggcgctcagacaaacagctgctacagatggcatttattgagggctcaggggatgggaggttgctggggtaagcagccttggacgtgctggcagggagtcagggttgctggggcgctcctgggttccagggcgtgcaggatgcagcagcgctcagggaggcaggaggcggcgtgccggcgcctggggcgaggggttctccaggcgtttgacgcgtagcagagcccccagtacgttctcagggggcacctcgggacccaaatcctggtccacagatcggcggaggcggcgcggggcaggagcagcctctggctccgaacttccggtgaggatccgccctagcaagtacctgcaaggattgcggaatgcggtcaggatgtatttgccatcgctgtggttcagaacccggacaaggcaattttctaattccgtatggcttgtaaccctcactcgagcctgcggaactcaccactactttccgaggaagtcagaggtcccggccttccattccagaaactgcccaccaccaggaccacttcctgcagaaaccgatccaccaccactccggggagcccttactcctgcattgtcccaccagtcaggggtccctgggcttccgtccccttgtactcaggacccgcgacctcacttctcaggctccagcgcagcacttttagtagtgattttacccccagtgcatgaagccctctgcccttgccctccctcccccttggtccccgcacctcagcagctcagggtccacgtcaggagtctcgtcgccggcatcctcgacgtctgggccagtggggccatcatcatacactgggggccggggtcgcggcgcagcggcaggggcggggacaagttgggctgccagggcggccgggtctaggcgagctcggagcagagcacgggcgagctgtgcagctggagcgtccgggtcatcgtcgggggccaagggcgggtccgaggcacgcggagagccccaggcgcgcagcagctgcgccaggacacgcgcctgctgatcctcagcctcctgcgcctcagcacgcgcgcgttcctgtctctcggcctccagcaggtgcgccagcgcccgcgccagctcctgcaccgcacccgccgcctctcctcggggcacggcccgacgcaagcggaggggagtgctcgtctcaaccaagggcgcggatgctgcgctcagactgcggggctcctgtgagaagatggggtgaaggaaaaaaatatcgtcattgtctggccagagatgcacaactaggggtggggctccatggattttcaatgaccacctcattcactgggcccctccaaaattcctatcgtgtctaaggtcccgggaaacccctaaatatctccaagggcacttcagaccactagaacacctctaggattcacacaatctcaaaacttgtcctgaatcctctggatgctatgctgttaccgttagtttcttttctcttcttcgttttttttggggggggggttggggcaggtgccaggtttggaataacactataacatttctctgttggaaattaaacttgcaaaaataagccaggtgtgggagagttcacgcctttaattcccagcctacgcaggcagatccctgagtttcaggccagcctcctctacaaagggagctccagggcagcctggactacagagagaaatcctacctcaagaaacaaaacaaaattttgcaaaaatcattttgaaagagaaattgcctgtgtctcaagagaagaatgggttgggtgttacagtcagcctgcaggatgtaaattcttgaaacatcacagcagcatttttataacagcataaaagtagggggtggggtgaaggaaagaacagcacggaaataaacaatgacttagtaggatactcatgatacacacatggaagatgataatgcgcaccaataaattaactataactgtacacttcaatataaatgaatctcacacacacacacaaaggcaaattctagaatcccactgcagatgacctaagtctatcaaagccaaggacttcttagtgacccctagtgaccatcaggaagcagatgcctagcttgattgcatttctcggatgttccagaagcaggaggaatgaaacaatgggtcgtttaaagatgagctgcaaagcaaagaacggactcaatgggtggaaaatagaaggtaatgcctatggggggcgcgaggctatcaaatggttttaaaaattctcctctgatctctcaacagctttgaagaggtagaggagcaagctgctccacgtgcccttgatcagcacccaccactctcagcgccggggaaatcacccaccagcaatccctacacacacacacacacacacacacagcccttaaaatgtcacacattttaacccaacactgccatatccactgcgagaagtggtctttttttcgtgcctgtgtgtacattcctgttggcgaaatgatcttcagttactctacctgagccaaccaaggacatgcatcgtctttaaaaacacaatgcagagacatcatggcttctttccctgcaatgacacagctccacaaagaagaagaagaaaaaaaaggaaactgtctcgtggatgcacgtagaagaacccaagtactcagtttacccaagccaccatgaaatatgtaccccaaggtacaaggaccactccttctaaaataaaaacaaatgaacacagaaacacacaagtacacagaaagatacgcccatatactacgtcaccacccataagaattcacaaatatacacactgtaccactaagaaagcaaccaggcccgcaaaaagtcaaccagaagcatccctagtattgtagggcattcaggggcagtcaaaccaaaggtcacactgaaaagaaacaatgcctatacacttcggtcatcacatcacaggcttagatatcttttctgaatacaccctagtgccacggacagctccacgggccacccgtggatcgagattaaaccaggccccagatgctgagggatgggcagggcgccctgaacaacatcatcctcacatcctgaaactgcccctggcctgcgcggggctgtcagctgcaggccaggtcaccctagccaagcccta

SEQ ID NO: 298 - DNA, 3800 bp, Mus musculus
aaagctcggggcgagatctgcgcgagtggaaggcgctggttcggccctgcaggaggtggagttgagtgagtctttaaaggtgctgccgaggccgcggcagcccggtctggcggactagaaagagcctttccaggagctgaggctcttcagccatgacctccaccggccaagattcttctactagacagcgaaagagtaggcacaatccccagtcaccccttcaggaatccagcgccaccttgaagcgtggtggaaagaagtgtgctgtaccccactccagccccaatgctagcggaggtaaagaagaaaggcaaaatgaagaagctgagccaaccttccctgaaagccctgagcggctccatgccatcagagagcaactgatcctggagggcctcctgggccgctgtgtgtcctttcaggcccggttcgctgagaaggaggagctgatgttggttcacagcctggaatacattgatctgatggagacaacccagtacatgaatgaaggggagcttcgagtactggcagaaacctatgattcagtgtatctgcatccgaactcatattcctgtgcctgcctggctacaggctctgtcctccggctggtagatgcactcatgggggctgagattcggaatggcatggccgtcatcaggcctcctggacaccatgctcagcacaatcttatggatgggtattgcatgttcaaccatctggctgtggctgcccgctatgcgcaaaagaagcaccgcattcagagggttctcatcgtggactgggatgtgcaccatggtcaaggaacacagttcatcttcgaccaggaccccagtgtcctttatttctccatccaccgatatgaacatggtcgcttctggccccaccttaaggcttctaactggtccactataggttttggccaaggccaaggatataccatcaatgtaccttggaaccagacgggcatgcgggacgctgactacattgctgctttcctgcacatcctgctgccagttgcctcggagtttcagcctcaactggtcttggtggccgctggatttgatgccctccacggagaccccaagggagagatggctgccacgccagcaggatttgcccacctaacccatttgctcatgggtttggcaggaggcaagttgattctgtccctggagggtggctataacctccgtgccctggctaagggagtcagtgcttcactccacacccttcttggagacccttgccccatgctggagtcctgtgttgtaccttgtgcaagcgcccagacttccatctactgcactctagaagcccttgaacccttctgggaggtcctggagagatcagttgagacccaggaggaagatgaagtggaagaagccgtgctagaagaggaggaggaggaaggtggctgggaggccactgcactgcccatggatacatggccactgctccagaaccgcactgggctggtctatgatgagaagatgatgagtcactgcaacctctgggacaatcatcaccctgagacacctcagcgcatcttacgcatcatgtgtcacctggaggaggtgggccttgcggctcgctgtctcatcctacctgctcggcctgccctggactctgagctccttacctgccacagtgctgagtacgtggagcatctccgcaccacagaaaagatgaaaacccgggatctgcaccgtgaaggtgccaactttgactccatctacatctgccccagcacctttgcctgcgcaaagcttgccacaggcgctgcctgccgcctggtggaagctgtgctctcgggagaggttctaaatggcattgcagtagtgcgccctccaggacaccacgcggagccaaatgctgcctgtggtttctgctttttcaactcagtagctgtagctgctcgccatgcccagatcattgctggacgtgccctgcggatcctaatcgtggattgggatgttcatcatggtaatggaactcagcacatatttgaggatgaccctagtgtattatacgtgtccctgcaccggtatgaccgtggcactttcttccccatgggggatgagggtgccagtagccaagtaggccgagatgcaggtataggcttcactgtcaatgtgccctggaatgggccccgcatgggtgatgctgattacctggctgcatggcatcgtctggtacttcccatcgcctatgaggtgctgatctcatctggctttgatgctgcacaaggggatccgctggggggctgccaagtaacaccggagggttatgcccacctcacccacctactgatgggccttgctggtggccgtattattcttattctagagggtggatacaatttggcatctatctctgagtctatggctgcctgcacccattccctccttggagacccaccaccccagcttactttgctgcgaccgccacagtcaggagccctggtttcaatcagtgaggtcatccaagtccatcgcaaatactggcgcagtttgcggttgatgaaaatggaagacaaggaagaatgctctagttctaggcttgtcatcaagaagttgcccccaacagccagtcctgtatcagctaaggaaatgaccacaccgaaaggaaaggttcctgaagaaagcgtgaggaagaccatagcagcactacctgggaaagagtctactctaggccaggctaaatcaaagatggctaaggctgtgcttgctcagggccagtcctcagaacaagctgctaagggaactacactggatctggctacctcaaaggagactgtgggaggagccacgacggacctgtgggcctcagcagctgctcctgaaaacttccctaaccagaccacctctgtggaggctttgggagaaactgagccaacgcctccagcctcgcatacaaacaagcagaccacaggggcttcacctctgcagggagtcacggctcagcagtccctacagcttggggttctcagcactttggagctaagcagagaagcagaggaagcccatgattctgaggagggcctgctaggggaagccgctggaggtcaggacatgaacagcttgatgctgacacaaggatttggggactttaatacccaggatgtattttatgctgtgaccccactatcctggtgtccccatttgatggcagtatgccccattcctgcagcaggcctagatgtgtcccaaccttgtaagacctgtggaacagtccaggagaactgggtgtgtctgacttgctatcaggtgtactgcagtcgctatgtcaatgcccatatggtctgccaccatgaagcctctgaacacccgctggtcctcagctgtgttgacctgtctacctggtgttatgtctgtcaggcttatgtccaccacgaggatctccaagatgtgaagaacgctgcccaccagaacaagtttggggaggacatgccccactcacactaaatcccagaccacactgcctgtttcccttctgaggccacaggcagggcagcttagttcaccgcagtccgtaccttggataaggggcctcacttgaacccatcttgaataccctttgccaggtgcttatttaagtacaaatccttttcaaaggactctagtgttcagttgttgatgtgcccctgcccactgcctgctcgaggaatacctctgttctacccagaaggagggagggacagcttagtagccctaggaaggagctgagatcacaaggatgacattgaaggagacaacggggcagtggcagcaggtcagcatatttaataaagttggagttgctac

SEQ ID NO: 299 - protein, 1088 aa, Mus musculus
MTSTGQDSSTRQRKSRHNPQSPLQESSATLKRGGKKCAVPHSSPNASGGKEERQNEEAEPTFPESPERLHAIREQLIGLLGRCVSFQARFAEKEELMLVHSLEYIDLMTQYMNEGELRVLAETYDSVYLHPNSYSCACLATGSVLRLVDALMGAEIRNGMAVIRPPGHHAQHNLMDGYCMFNHLAVAARYAQKKHRIQRVLIVDWDVHHGQGTQFIFDQDPSVLYFSIHRYEHGRFWPHLKNWSTIGFGQGQGYTINVPWNQTGMRDADYIAAFLHILLPVASEFQPQLVLVAAGFDALHGDPKGEMAATPAGFAHLTHLLMGLAGGKLILSLEGGYNLRAKGVSASLHTLLGDPCPMLESCVVPCASAQTSIYCTLEALEPFWEVLERSVETQEEDEVEEAVLEEEEEEGGWEATALPMDTWPLLQNRTGLVYDEKMMSHCNLWDNHHPETPQRILRIMCHLEEVGLAARCLILPARPALDSELLTCHSAEYVEHLRTTEKMKTRDLHREGANFDSIYICPSTFACAKLATGAACRLVEAVLSGEVLNGIAVVRPPGHHAEPNAACGFCFFNSVAVAARHAQIIAGRALRILIVDWDVHHGNGTQHIFEDDPSVLYVSLHRYDRGTFFPMGDEGASSQVGRDAGIGFTVNVPWNGPRMGDADYLAAWHRLVLPIAYEVLISSGFDAAQGDPLGGCQVTPEGYAHLTHLLMGLAGGRIILIGGYNLASISESMAACTHSLLGDPPPQLTLLRPPQSGALVSISEVIQVHRKYWRSLRLMKMEDKEECSSSRLVIKKLPPTDVSAKEMTTPKGKVPEESVRKTIAALPGKESTLGQAKSKMAKAVLAQGQSSEQAAKGTTLDLATSKETVGGATTDLWASAAAPENFPNQTTSVEALGETEPTPPASHTNKQTTGDLQGVTAQQSLQLGVLSTLELSREAEEAHDSEEGLLGEAAGGQDMNSLMLTQGFGDFNTQDVFYAVTPLSWCPHLMAVCPIPAAGLDVSQPCKTCGTVQENWVCLTCYQVYCSRYVNAHMVCHHEASEHPLVLSCVDLSTWCYVCQAYVHHEDLQDVKNAAHQNKFGEDMPHSH

SEQ ID NO: 300 - DNA, 43164 bp, Homo sapiens
cctccatccctacctgcccccaacagtctttcaggtgtacccattgctcaactgtatggaggggatcccagggggctcaccatatgccggctgggcctacggcaagacggggctctaccctgcctcaactgtgtgtcccacccgcgaggactctcctccccaggccgtggaagatctggatggaaaaggcagcaccagcttcctggagactttgaagacagagcggctgagcccagacctcctgaccctgggacctgcactgccttcatcactccctgtccccaatagtgcttatgggggccctgacttttccagtaccttcttttctcccaccgggagccccctcaattcagcagcctattcctctcccaagcttcgtggaactctccccctgcctccctgtggtgagaaattcaaaaaaggacagggaagttgaggtgggaggggtggcccaaagtaaagctgagctgagcctagctccctcttctcctctccaccccaccagaggccagggagtgtgtgaactgcggagcaacagccactccactgtggcggagggacaggacaggccactacctatgcaacgcctgcggcctctatcacaagatgaatgggcagaacaggcccctcatccggcccaagaagcgcctggtaagaccacagacctgcttcaccttatacacaggaacccctgtcctcaccctgtacaagaagccacatcttcccattatataggaacgctgttctcatgattacaggaagctactgcaggccaccctgtatgggaacccctgtcccaatatcacatggaaacccttgccttcatcctacacaggaaaatctcctcatcccatatggaaatccttgccctcaccctgcatgagaactcctgccctttccttgtacaggaacccagatctatagaagctcctatcctcaacctacccttataagcttcaaacagaaacctttgtcctcaccctgcacaccagtgttttcgtccttggcttcacactggaatcaccccaggtcccttctcccagatgtgctgatggaattggactgggatgctgcttgggcatcaggatattttagctccccaagtgattccgatacgcagccaaagctgagaaccaccaatgtagtcccccatagaatacagaacaaaagaaacttataccagataggaacccctgtactggccccatacagaatcctcaggcatcaccctgtaaacaaagccctgccttcaacctgaccctcacttcttgggtcctcctgacatcccctgtgagccccttacccccacttccacatccccagggcactgatctcacatcctgtcgtcccctagattgtcagtaaacgggcaggtactcagtgcaccaactgccagacgaccaccacgacactgtggcggagaaatgccagtggggatcccgtgtgcaatgcctgcggcctctactacaagctacaccaggtgacgccctgccccttggagccacccctctgctttccctgtcttcatgccacactgccccccactctgttcctgttctacctctctcttcccccacaaccctctttcctctttcccctttccctccttcctcccccttcccccatctcttctactttcccccttcctccatctcttctactttcccccttctctgttattaccctccctccttccttctccattccctcctcctccgccctcctccttcctctcctctcccccacctccaggcatcagctaatgtccaaccccctgccctagaccttgggcagctcctatcagccttggaggctttcctaagctcagggcctcacagcctcaggattccttggacaatctcagcacccaaaaattatcttaccctgaaagaagtggggtagagagggtgtccctggttgacacagagaggcaaaggtctggagttggggacacccgcagcctcctttttggcaggtgaaccggccactgaccatgcggaaggatggtattcagactcgaaaccgcaaggcatctggaaaagggaaaaagaaacggggctccagtctgggaggcacaggagcagccgaaggaccagctggtggctttatggtggtggctgggggcagcggtagcgggaattgtggggaggtggcttcaggcctgacactgggccccccaggtactgcccatctctaccaaggcctgggccctgtggtgctgtcagggcctgttagccacctcatgcctttccctggacccctactgggctcacccacgggctccttccccacaggccccatgccccccaccaccagcactactgtggtggctccgctcagctcatgagggcacagagcatggcctccagaggaggggtggtgtccttctcctcttgtagccagaattctggacaacccaagtctctgggccccaggcaccccctggcttgaaccttcaaagcttttgtaaaataaaaccaccaaagtcctgaaattgtgggtgtgtctatgtgtggctgaacagcagagctgagtggagtgtgtaacaatgcctgtggctctctgatgacagtgcatggctgcaatgtgtgaccatgtgaggctggctgaggcggcacatgtgacactttgtgaccaagggttatgttgtgtgattggaacaatctatgtgaaacttcttgtgaagtgtccaggtggttccatatgtcatggtaagaggccacgcagggcttgctgacggtgggggtggtgccgggtgactataagcacactggaagtgtgtgtgctggagcaggtgataaggaggtgtgcggggctgtggtcttgtggctgggcatgacgctgggggacctttgagacggcatgacgctgggggaccttttagacagcatgacagcatacgtggtgggcacagaatctggtaaagattcttggaatgttgaacaagaagtgtgtgtcaggatgtgtttgtgggtctggcgatggcaatatttcagtgcaagtccctgtgcatgggcatgggtgtgcgtgtgtgtgcattacgtgtggcatgtgccatgtcacagtgtctctgagtggctgacaacatgagcagctctgtgtacatttgtttgtggaggtctcaacagcagagtttcagagggtataagttagggactctcttccaagggacaaaagacacattcaggaaaggaacacggagaagggtggagctggaatggtagctggcaaggtcagaggccagtgctggggcgcagggttgtccgtgggtcttcctgtcggactggtcttatcttgctcagcccagctcagcctgcagccctgtgggaaatggtagagaatgagagggggagattagggggacaaagcagcccctggaggtggtttcaacctcagtaggtggggcgctccacacagtgccaaccccttccccaacattcccactcacctgggtgaactgctccccccacagcggagtctgttcctcaatttcacaaacacacaggagcataatctgagtcatgccttaagcatcctaaggcagactgcttaagtggctcaatggaggccacacagccagtggcaaggggcccagcggggcagtctggcctggtgtccatgtgctcagccacaccccacagccagcagcaccctttcctaagggctcactgtgggtcaggcggcaggctgggaggctccagttgctttagttcattagtgcctgaaataaatattctgaggaaaatatacccatactcatttcactaatggaagagtgaggcccagaactgatgagtaacttaccctgaccaccaagtttaaggagtggattttggatggggtgacacacccagcccagcaaataagtgctgctcacacttaaccgctctttatggcttcttccctagagccccggatatgggggttgcagggacccacaggtcctgaccatattataggtaagcagctgtcctccacagaacaccagcccatcagctagcgggcattccagctccactaagtagcctgctgcagaatcacaggagtctattatgctcactgtgggcattgtccacaacagccctgatcccataaaagacacgtgtctggcctcccctcagaagcccagccctcacaccctgcaggaggccccatcctctaaaaacccccttcagaacctgtgctggacacatgcctggccccaccttgttcaggagccccgggcctcacccccataagtatagctcccccagcctggtacagaagactagctctgaagctctaggggagcccttcatctaattatcgacaggaaacccatcctgatcctgtacaggaatgccagcgcttaccctgaataggaggaacctctgcctaaccccagctagggacatctggactaagctgtaaggaagcccctgcacaccctggacaggaacccttgtcctgaccatccacacaagcctcagtctccctatacgaatcctgtcttgacctcagacaggaacacctttgtactcacactgctgcagtcctgtcctccaggtagcattttaaaaacacctcactcacaataatctgagtagtaaaccatggacccagctctgtctttacagaaatccctgtcctcaacctcttcaaggaccctgactgtgtgtggaacctcttgccttcattgttgacaatgatccctgatgttgccctgcacaacaatccatgacctcacaccctatcccatagagtccacaggaacccatgatccaactctcaacatgaacctcagtctttaacttgtatagaaaaccacttcctgaccttatggcaggaatgcctgtcttgaccatttactttaagccctgacctcagcctatacaggcacctatggcctcacctgatacaggacccccccttctcactatataggtcgcatttattgatgctgcacgaggctcctgggccttaccttgtattagctccactaccctgaccctctacagcaggggttcccaacccccaggacacggactggtactggtccatggcctattaggaattggtccacacagcaggaggtgggcagcaggcaagcaagcattaccacctaagctccgcctcctgtcagatcagcagtggcattagattctcataggagcacgaaccttattgtgaactgtgcatgcaaggaatctaggttgcgtgctccttatgagaatctaactactgcctgatgagctgaggtggaacagtttcatccccaaaccatcccccaccatccgtggaaagactgtcttccacgaaaccggtccctggtgccaaaaaggttggggaccgctgctctacaggaagcctgaccctaaaactgttccaggacttctgactggtctctgcagaaagcctttgtcctgaacctcaacagaaatcctttacttttacagtaatttatttacaggaatctctgtaatttacaggaatctctgatctttataggaactcctagctttactctctggaaatacactgcttaccctgaacaggaagcttaatgtgattctctataacagccttttccctggccttgtcccagaagccccacctgcaccctgtacaggaaccactgccctgacccaacaaagaaacaccgacctgaatctctgaaggggcagtgtcctaactacacagaggatctttgtcctgaacccgcacaggaacctctattacccccagcaggaacctgtgccctgagctagcacagaaaatcctgcccttacactcaacaggaacctttgatttgcctctttagagtaatccaaagaatgaaccagtataaaaaacctctacactgtacaagaacctctgttctgtacttgttaaacaacccataatcagaatcaccatgaatacctgcctggagactgtacaggaacccctgacctaacccccaatggaatcacctgatctgtctgtctctagtaacacagctctgatcctggacagaaatacctggcctgagtacgctgtgatcctctggcctggccgtctacagaaaaccactctcctggcctcaaaaggaacacctaaccttaatctgtatgggaaaaaatgccttcacagttttccctctcactttacaatgtctccaacctttgtatttccctgcaaacctgccttaccaggtaacagaatcattctcctgaccccagacaggaaacactaacctgacccagagatgctcctacccctacacagtaagagtccctgtctcaatgctttaaagagaaatttctatagcagtgctgtccaatagaaatatgtgagtcacacgggtaattttatattttcaatgtagccacattaaaaagagaaaaaaaagataaaattattttcaataacatcaatatacttaactttacccaatatattcaaatattattttaacatgtaatcaatataaaaattactgagctattttaaactttttatactgagttttgtgatctggtgtacatttcacatttatagcacatcatctcaagttagactggccacatttcaagagcagtagccacacgtggctggtagctaccatataggacagcataggtctgtggagtctacggaaccctatagcagacactgctataagctcattgagacctgttcctgttcttcctgagctcactctacctattccagcctcctctgcagatagatgtgggcacatgacagagttctgaccaatggagtatgggcaaaagtgacatataccagttccaggcctgacccataaaaatctctcatgcaatcctccatttcctctctttccctgtctaccaactgaaaaccaactaactccaaggacctagaggaggacagagtcacaaaatagagtttgcctgggtccatgaatgaacagtagtaaatattcagattggcttttgaatgagcaagaaataaacatttattcgttaagcccctgaaattctgggttacagcagctaggataatttagcctaattaataataatctctccccctctctctctctccttttttttttttttttttttttttgagatggagtcgcccaggctggagtgcagtggtgcaatcttggttcactgcaacctccgcctcccagattctcctgcctcagcctcctgagtagctgggattacaggtgtattagcccggctaatttttgtagttttggtaaagatgggatttcaccatgttggccaagctggtctcaaattcctgacctcaaattatctgcccacctaggcctcccaaagtgctgagattacaggcgtgagccaccacgcctggccagtaattttttttttttttttttgagacaggatctcactctattacccaggatggagtacagtggcacaatctcggctcactgcaacctctgcctcccctcccaggctcaagcgatcctcacacctcagcctcccgagtagctgggactacagatgcacaccaccacacccagctaatttttgtgttttttattgagatggggttttgtaatgttgcccagctggtctcaaactcctgagctcaagcaatctgccctcctctgcctcccaaagtgctgggattacaagtgtgagccattctgcctggccaataataatctcttgaccgaaatctagacacctgatctcactgtctatatgaacacaagctctgaacctatacagaaacacctgtgacccagtactggcccacctgatctctttgtaggaagctgtcataacataggtctaagaagccccatcctggccacgaatggtggctcacacctgtaatcccagcactttgggaagctgaagcaggcagattgcttgagtccaggagtttgagaccagcttgggcaacatggcgagaccccatctctataaagaaaaaaaaattaggcaggcatggtggcatgcacttgtagtcccagctacttgggaggctgaggtaggaagacagcttgagcccaagaggttgaagcagcagtgagccgtgttcacaccactgcactccagcctaggcaacagagtgagaccctgtcccctgtatcaaaaaacaaaaacaaaaaaacaaaaaaacaaaaccttaatccttaacttgcacaggaacaggaacccatagtctggagctctctagaaacccctgcttgattcagtaaaggtacaatatagaaaccataggaatccctgtcctcattctgtccaggaacatttggaatgacccaccagaggtacactagaagtgacctgaccctgcccatgaatccctgtcctcacacacctcacacaaaaggaatacctctccttaggaaaaaaggcccctaccctcaatcctgcaaaagaataccagccagatagagaccaaggcctgacactacagcacagatcggcaaactatggcattcaagccaaagccagactgtgggctgttttacatttttaaagggttgttttttaaaaagagaaaaaaagaaaaatgccactgagaccgtatgtggcctgcaaagcctaagatgtttactctctgtccctttataaagtttgctgacccctgctcttcagaaacctctcttctgatccaacagaaaaatgggccttgaccctttgcaagactccctactctatcaggctgcaggtatcagaactctagaatttttttgtagtgtgttatcattgtatgtgttttctttggtgagtgtaggggtttaaaggtcttaggtctgcaactcttttgcgctgagacaaaagataggttcacgtaggaggggtgagagggaagaggcggcaggacatcttcaagaggatcagagggcaaagctactgggcggtgagaccgtcaatctgtcagtctgatgcagaacccccggactgcttatctctccggtcccagcttatagcccggtaggaaatggtggagaatgagacagggagattaggaggacaaaccggcctcctgcagagctgacatttagacatggagtgggagttgcgggggagagggggtgcctagggacagctccccagacgcacacacactttctattactgcttgggagcagtggttacccgttggagggggcagatagggagagctgctgcccatgagaactcccatcctcaaggccattctggccctgggcactattattatcacaactttccagatgaggaaacggagcacagaactgttcagcaacttgcccaaagtcacatggttaagtcccgtaacctcagtttccttatctgcaaagcagccttaataatgggaactacctcatagaattgtggtttacaacgatgcctgtcacataatacttgctatcattaccattccctgcccccactaagactccttccactcagaatattgcggcagaatattaatagctaatattcggccagtgtttcctgtgtaccaccatagtgaatattaactcggaaaatcctcacatttagcatcgtcaccacgcctattttggccgccaccaccaacgtccagtggcaacctcgctctcggcccagccacaaccagcccgcccgcgctacgtcatcacggcgcgtcgcgcgggaagtcgcggggaaaaggtaagatgccccttcctaattccctcgcttccttgcttgctctccagacaccgccgacccgaagggctcctaagtgactggacagggacggaggggcggcggctatggcatccgggacgacagcgacgatagccgaggcaagaaaaagcttgcaccgcagccctgtcgggaaccgccggcgcctgccttttacgtaggcgcagcacagctggcgtagcacgccgacgcaccgccccgtcgcctgtgagctcgcggtgtggctcagcccagctggcgtagcacgccgacgcaccgccccgccgcttgtgagctcgcgagaggtgtggctcgcgcgaggggcgcggccttgaggcacggtcccctctggaggcgggatctgggcgggcagtcgagagacgaggcccaatggaaaagaaaagcctgagcgctcgcgtccccacaggtcgccagaaacttggtggagcgagccaagggcggagtttgagaaaggggctgcgtccaatgagtggagcggtgagtacagcgcgtcgacggcggaggcgggaagggggcggaggccgaccgaaggcggctagggactggctgaagagggttagcgaaacgttagcggtcgggtctgggcagggggtggagctggttgaaggaacggggcagtcccctgaggagcggggctggttgaaacgctaggggcgggatctggcggagtggaaggtaccggtccggcccgataaggggtggagttaagtgaatcgttaagggtggagtcgaaaccggggtcggggccggggccggctgagtgaaagggtgggtgattatcccgggagataggccgaaagggcaggttcgtgaaggaatggggtctgggctgggcttagagggtctgggaatggggcttaggagagtagaaggggcggtgattggttggaaagggcaggccctaagacggactgtgtgagcccgggggctcattgctccgtgaaagggcaagaccagggaaagagaatcgtgtaaaaggggtggagtctagcgggccgggcggggccgggtagaatggccacctgagtggagggagaaggcctgagagaggcggagtttggaaggctgtggagaatcagatcgcgtaaggaatggaatctaatagagggggcggagcctggaaaagggcagagaggtggggtcctcagggcacactagccccctcacatacccacgctcctccccccacccccagaaccgcggcaggggccaagcctcctcaactatgacctcaaccggccaggattccaccacaaccaggcagcgaagaagtaggcagaacccccagtcgccccctcaggactccagtgtcacttcggtgaggccctagacccgccctgatgagggggagagggagcaagttggtcatgccctggactctgacccttctctctgattcacagaagcgaaatattaaaaagggagccgttccccgctctatccccaatctagcggaggtaaagaagaaaggcaaaatgaagaagctcggccaagcaatggaagaagacctaatcgtgggactgcaagggatggtgagcagggcctggctgcagtttagcctcgtatgacaatcaaaacccaaaggttccccaccctggacagttccctctgactcagggcctaaaatggatctgtgtctccttttttttttcctctgcaggatctgaaccttgaggctgaagcactggctggcactggcttggtgttggatgagcagttaaatgaattccattgcctctgggatgacaggtgaggctgggtcctccaggctgtctccaaaccacaaaaatacacacacttagagcccattagcaagaataaatcttttcttaccccagcctggatactggaagcagatgatttggggaggtagggctcacacttgaaagggttcttttatgtagctaacaaacatttattgagtgcctattgtgtgccaagagttggtgatacaaatgtaccaaacaacagacaggggtccttctctaggagcggattgatgagtaggagggcagatcattaaacagccaacagcagtatgaggtgtttaatgaagacagacttaagaccaggggattcaagggtgtataatagaggatcctaaactagtatccgggcttcccagaagcctttatagaggaagagacgtttgtactgaaacagaaggatgaaacctcccgtttgctttacttttcaaaaagaatcagcaaatccttttggctatatgttcaaaatatattcaccatctgacctctcctcaccacctccactgccaccatcatcatcactcacctagacttgcagaggcctcctccctggtcccctacttccaacctcacctctattatctgttcatgcagcaacctaaaaaaatatgtatgagttgatgtctttgttaaaatactttaaggaggccaggcatggtggctcacgcctataatcccagcactttgggggggccaaggcaggtggatcacttgaggtcaggagttcgagaccggtctgaccaacgcgatgaaacactgtctctactaaaaatacaaaaattagttgggcgtggtggcacacacctgtaatcctagctacttgggaggctgaggcaggagaatcgcttgatctgggaggcggaggttgcagtgagccgagattgtgccattgcaccccagcctgggcaacaagagcaaaactctgtctcaaaaagtaaaaataaaaaaaaaaaaagtactttaagggcaaactgttgccctcaaggtaaagtccaaatttttcatcctggcctcaaaggttccacatgatctggctccacatcactttgtgacctcatcagccaatccttctcgcccacactactccccttgttcttccaacatgccaggcaccctcttgcctctggtctgtaccctgaccaacccctttcccagagattcttttcggtcttctactcttccagctgcctttcacatcccaatgagactttctcagagaaggttttgcctggccaaaccctaccccaatacctgatcttattttcctagcccatgacattgtttgctaattatcatacttgtgtgtttaccaattaatatctatatcccttatcccaacctaagactaacttactatgggaaaaagacttcttttatggaatacctatttaccatctattgaggagctagggatacagcagtaaacaaaacaaacaaaagcctgtgtcttcagggtaaagggggaagacagacaataaataaacaaaaagtaaatgatgcactgtggtagaaagagcagtgttatgaagaagcagtaaagggaggatagtaggagaaagtacagtggaggagacttcaattttaaataggctggtcagggaaggcctcactatttgagcagggatctgaagaggtgaaggagtaagtcatggagacagttggaggaagagtattctaggcgggggtgggggggccagctagagtaaagttctagggctggctgaagagtatttggttcaactgagaaccagggaagagaccagtgtaggtgaagcgaagcaaaggaaagagggaggggtaggagatggggtcagagaggtgatggaggacagattgtttagggccttctgggcatgggtaatactttggcttttactcagaatgggatgggagcctcgaagggacatgaactgattagggttttaaccagtgtctagctgctatgcacagaaaggaccgttgaggtggcgagggtcgaagcagggaggccgaggagatgccgccacagcccaggcgggagggtatggtaatagcagtggcagtggtgaggagagggtcacacaccagagctgatgggaggcaggactgacaccacagttttggggtaagcagctgtggaagggtggatggggagatgtggagagaacagatgtggagctccccagtgtcctcatgcatctgtgactgtgactccatctccccagcttcccggaaggccctgagcggctccatgccatcaaggagcaactgatccaggagggcctcctagatcgctgcgtgtcctttcaggtaaggcccccaagccaacactctgggtgaagggcagggagctgacctgacctgggtgcagcccatgccttaaccctttaccccactttattcctcatctctccccaggcccggtttgctgaaaaggaagagctgatgttggttcacaggtgaaggcttgggagccttgtagggatggggaggagcctgccctggacaaaccagggcaagctaaacgctttgggaagcaatgtcatggtctctgcagccagccttgggcaagtcgctgagcctttctgaatctgtgtcatcgcctgtaacaaggggaccagtaaacataagttcctcaggagagtttgatgtgtgtcaggtgcttagaacagggcctgatatataatcagcccatgatgagctattactgttatcatgatctgattgtgtgaatagatggtggatgtgtggacagagtgatcggggttcccccaggggcttccagatttagaggcctagtgctatgtggcttgaggaaagctagcttccagagcaggtatctgagctgaactttaagaggagaaaaagagtgagtcagatgaagagggtgactgagggaagggaagaacagacagctgaaccagtgtggccaaaggcctgaaagtaggatttggtgtggctactgcaggggagcagagaacattacctgaactgaggcgggctagggaagaaacagaatgtgtcttatatcctggctattccttcaggttgacagttgggggagccaagccctaatttgaccagggggttggtgtatggacagctcagttggggaagagacagggccctgaatctcatctcccatctgtgtctagcctagaatatattgatctgatggaaacaacccagtacatgaatgagggagaactccgtgtcctagcagacacctacgactcagtttatctgcatccggtatggatgagaactctgcgggcagggaatggtggcaatcttggggtccccatccctatgcccaccccaccctgggggaagcagctgagtggatagggctgttctctcccttactccctttctggctccccactgtctctccagaactcatactcctgtgcctgcctggcctcaggctctgtcctcaggctggtggatgcggtcctgggggctgagatccggaatggcatggccatcattaggtaggactctacagcatttgactttttacattgttttaaagtccttccttcaagtgtaaaatgtattgatatgggtaatatattcatgtgattcaagaatccaaaggtaaaaaagagaatataattaaaaatctgtctcccatccttgtcacccagacacctgcctcctctcatgggaggtagtcattggaaccactgactcatgtgtcctcccacaaagtcttattcaagaaataaataccatatttcattgattctaaggtgtacattttttcatatttgtaacatcttgaaatccagatgcatcttacaaacagtgacatctcagaattccattggcagtattttctgcttcgtttttggcatgtaaaatcatggtacatcttatcatcattggcatcccagaactgatgaaatgcaaaagctttctcctccctcccctgtttttaaccacaaatggtagtaacatgacatactcccttcgtaccatcttttcacttacacatcttggaaacctttctctaacagtatgtatcttggagcccggtagaacaccattgtgtaaatgcactctatgttaatcagtccccgactaatgggcattttggttctccccagtcatttgctgttttaaaaaaatgctacagcaaatatgctagtacctttataaaaataaaattttattttacactaacataaaataaaaatgttacttcaccctttttaaaacacaggttgtgggctaagttcctgcagcagaatgactgggtatgagaatgaatgcgttgatcattttatttttatttttatttatttatttattttgagacggagtctcgctctgtcaccaggctggagtgcagtgatgcaatcttggctcactgcaacctctgcctcccaggttcaagtgattctcctgcctcagcctcccaagtagctgggactacagtcgcccgccaccacacccagctaattttttgtatttttagtagagacggggtttcaccgtgttggccaggatggtcttgatctcttgacctcgtggtccacccacctcggcctcccaaagtgctgggattacaggcctgagccaccgcacccggcctttatcattttagtgaacattttcaaatctcctttggagacagaggggtagattggcagggggtgagagtttgagggcctccattactcagttcccggcagatttttaggcatcagcattaaaggaattggtggtccaggattagagagcaggggacagtctgtctctgcagaggaggacccctcacatactccaagctgttatttccttgtcttgcccaggcctcctggacatcacgcccagcacagtcttatggatggctattgcatgttcaaccacgtggctgtggcagcccgctatgctcaacagaaacaccgcatccggaggtcagcaacagagggcagatgtgatgggggtggcatggggtggggtgtcctggtctgggctcttcccccagattcaccttgatctccttgcacagagtcccctctctctgctgctcctagggtccttatcgtagattgggatgtgcaccacggtcaaggaacacagttcaccttcgaccaggaccccaggtataccccgactcccacctaggtgctagactcccagccacctcccacccttacaggcccagccagaaggggtccagaaggaggaaaaggcattcacattcatggggcctatcctgggatcaggatctgtgctacttttgtgtgtctgccatctctcctaatttcactctgaggcagggactgttgggttccctattttacagatagggggactgaggcttatacgttaagaggtcacacagagaagaactgggagagacgggatttgacccacaaatatttgaagatcttattcactgattaaccgttgggttagagtgaacctcaaattactgctttattttttctgattaggataatgcttcaaagtgtttgtttatcctttcagtagatagtaaaaaacaaatataaataaataaataacaaactatttgtttaaagaaattaaataatacagaagtgtctgaagcagtgagtctcctctaatttccattacctcaaaaataagtgttgacagtttaggttatatccttacagattttctctatagatgtctgaatttttattattattgttataattattaataacacactgcctaatggaataattctccacatgttcttcgacaacttgctttattcatttaacagcatatctgggacatttctccatgttagtacctcttaaagtatctcgttctttgtagtattcaattttatgactgtacctctggttatttaaccccaggacttttaagatgcctgccagtttttgctattacaggcacttctactgtgaatagtctagtaaatatgtaattctgcacttctctgagtctatctgtaggatgaatttctaacagtgggttgcttgggccagagagtcagcatactttaaagtctggtatacactgccagacttccctccaggaggggaccagcttacccttcctgcagaaagtgattgagcaagtccttgtcagtaggagacattactaagtacatgtcgagtatcccttatatgaagtgcttggaaccagaagtatttcacatttcagattttttcagattttgaaatatttatattatacttagtggttgagcatccttaatctgaaaacccaaaatccgaaataccccaatgagcatttcctttgagcatcatgttggccttcaaaaagtttaggattttagggccgggtgaagtagctcactcctgtaatcccagtactttgggaggccgaggcggatcacctgaggtcaggagttcaagatcagcttggccaacatggtgaaaccccgtctctacaaaaatacagaaaaattagccaggcgtggtggcacacacctgtatttccagctactcaggaggctgaggcaggagaatcacttgaacccaggaggcagaggttgcagtgagctgagatcgcaccactgcactccagcctgggtgatagactgagaccccatctaaaaaaaaaaaaaaagtttaggattttacagcatttcagatttcagatttctagattagggatgctcaacctgtagtagttttatctagccttcttcctagctgactacagagaatccacttatccaagatctgaagaatccaatttaggttggttgttctctagacattgctttattattttgcagcattcagtgttcctgacaggtgtctgcttttcattcctttccaagtaatctactttcctctctgcaaggttatcttggtgttcttttttttttttttttaaattattagacagggtatcactgtgtcacccaggctggagtatagtagcatgatcatagcccactgtaacctcaaactcctgggctcaagcaatcctcctgcctcagcctcccaagtagctaggactgcaggcatgtgccaccacacccagctaattttttaaattatttgtagagacagggtctcactatattgcccagactggtctcgaactcctgacctcaagtgtcctcccactgcagcctctcaaagcactgagattacaggcatgagccactgtacctagccttgatgttctaaacttttaccctggccttttcactctgtttaatagtaggtagacattttacatctgaagattcatgcttttcttaaactcttggaaattattttctattagatctttgataatttcttctttgttttctctgttctctttctaggacttctgttagtcagatgttagacttcctgggttgatcctctatgtctctctcttttttattatttatttatttatttatttatttattttttttgagacaaggtcttgctctgttgcccagactggagtacagtggcacaaatacgactcactgcagcctcgacctcccgggctcaagcaatcctcatgcctcagcctcctgagtagctgggaccacaggtgcacaccagcatacccagctaattttttaatcttttgtagagatggggtctcaccatgttgcccaggcttcttattttttatcttatgttttctgtctcttttttcttttgctgtgacctgggagattttgtcaactttatcttcaagcccttctgttgaattatgtatttagatatcctgttaaactccaaaagctctttcttcctctctgtttctatgtcctctcatacctgatcttgtttttatagagtatggattagaagtgccggctgggtgcggtggctcatgcctgtaatcccagcactttgggaggccgaggtgagtggatcacttgaggccaggagttcgagaccagtctggccaacatggtgaaaccccatctctactaaaaatacaaaaattacccagacgtgatggtgcgcacctgtaatcccagctactcaggaggctgaggcaggagaatcgcttgaacccaggaggcggaggttgcagtgagacaagatcatgccactgcactccagcctgggcgatagagggagaccctgtctcaaaaaaggaagtgccttaagtttcttctgttgtctgagttatgtctctttattctgaggctggttgaattatttttttcttggtccttctcttttatgctgatggttttcctcaaatgtctagcaatccttatttggctatttatacccaagaatgaaggcccattgtagggggctgtcagaggactactctgctgcagtgtttgtaggtctgttttcctgaaaggcatttccccagaatggggacagggaatgtccactgacaggttgcaactttagcgagtgtgggcaaggacccgggcattagatgggatcctgccagatgtcagaacaaaggaggcctcttctttggggtaacatctcttttttccctcagcctttccaaagtgtatctgttgtacttatcttttccagtgtagctttgggctttgttggtcatctctactgttttattatggtgggtttttaatacttcattaatttttctggttttatctttattaatgttttcctccgacgttctttattttgttcatttctggcttctggaatttaatgcttcaacatttatcaactcattggccgatctcatttcatctatacctgtacccactgccctcttcctgttttccttcaaagctaatcccagataccatataatttctcctgtaaatatttcagaatgcatctctaaaacataagtacacttttttagaaaagcattaccttagtatcaatacctgaaaattaacaataattatttttttaatctgccaagggtctgtcattcaaagaattctttaatatcattaatcattctttttgtttgaataaatgcataggaggctatagctgtgtgttctttcatgggtacactattgattacacacacagatgtgaaacactgtgaatatattcagtgcattcttccttattaacaaacgtgtgtaaacaaacaaacaaaaagaacatgtccatgcccttggatctcccagctccccatctctcagtctctgaactccagcagcagggagacaaactggataatccttaaaatactgttgtgaagacaaggaaagcagatgatctaaaactaagtagttaaaagaaacaagtaactttgttgtattggtgattcagtgagttggctcttcagaagggattttgtgtgcattgacctggatctgtactggatttctccagaaaggaaacttcagcttatcttgggtgcccccttatcctgctcagcatgagacagagcaccctggggcccctggaatctcaaagtctactttctagaaattcattgaagtctcttattctctgacatcctttccactctctctttctgggttgctgtttgtttacaatttctttactgtattttgaatggggtagtaggaggttgaggaagtaaacctgtgctatcaatccaccatttaacttgaaggtggttgaacttattttgaatttcccttctgttttctttttaaacttagcttgagtgctagttctgctgtttattgactttgatggctctcttttagagtcagctttcttcagatcttttctttcttcctgtcttccccaatgatatttttttcttttcctttctttttttttgagacagagtcatgctctgtcgcccaggctggagtgcagtggcccgatctcggctcactgcaacctccgcctcctgggttcaagcaattctcctacctccacctcccaagtagctaggattacaggcacgcgccaccacgcccagcaaattttttgtatttttagtagagacagggtttcgccatgttggccatgctggtctcgaacttctggcctctagtgatccgcccaccttggcctcccaaagtgctgggattacaggtgtgaaccactgcgcccagccctctggtgataatttttatgtcctactgtgtttctcttcctctaatgattaacttactaaaagtttagaaccaagatttatctatcaatgtcaaaaataaaacaatcatcctccacctactcaacaccagagcttttgcttgtttttattccccaattccaagctcttttccctcaattttaagaatctttctatatcacttgcattaaatttcacaactacattatcaacccattaaaatgtgactcttaagtttgtctagattcaatgcataccactatttcttgcatttccctaaaaaagctgccttagatcctctctggaacaaagcagggggtaaatgaccagatagaaggatggatggatgatagattattcattttgctttccccagtcagaattaagccctcccatggccccttgctgggctttctgtcaaaacacgtgcatcgcatcttttcagtatctgttttgcgtgtcggtcatactcacccctctgagtgctcattctctcgcctataaaatagaagaagtagtagaggtggcctgtaaggcattggggaggaggaactgccctttcactggcctcatgacagccccagccagcacccccgctctagttccacccacagaagcaagtctcacccctaccccccaggtctctccacttcctgctagagaatcacccagctccccagcctggcttgaggctcttttcagccttagctggctccccgcagctaagagccccatgctccatttgggcctccagtgtcacagggtttgacctgctgttactactacctttgtcataggggcaggtagtgggcggacatgatctagagtaccccacagagtcaggagcccccatgatctgagatagaccctagagctgagcctgaaattgggtgggcactgagggggcagcgatgtttgctgagggagaggttctggtgagagactaaatgaatgagcgagtgaggtaatggataaataaagataagaatgaaaaaatggtaagatgattaaattggtgactgaatgtaagggtaaattaatggaagaatggattcatggattaaataattaatggggaaattaatgaatgagagaatgaacgagtggttgaatggggaaatgagtggtagaggaaactggcaactgttgggttgggggtgtctatggggattgacttctccaactctcttacctctttttcttctgcccccagtgtcctctatttctccatccaccgctacgagcagggtaggttctggccccacctgaaggcctctaactggtccaccacaggtttcggccaaggccaaggatataccatcaatgtgccttggaaccaggtcagcatctacccacctctgcccccaaagtgaggcccagccccgcccttctgtcagcggctcgggacaggtggctgaacatcccccatcacactcctgtgtctgcaggtggggatgcgggatgctgactacattgctgctttcctgcacgtcctgctgccagtcgccctcgaggtcctggggatctggggtgtgttgggaggaggagtggccttgaaggttaggctgtgagggtaggtagcctcatggagtctgttcccccttcagttccagcctcagctggtcctggtggctgctggatttgatgccctgcaaggggaccccaaggtaaggcaggctccctggggcggcaggtgggttgcatggagccaggctgaccctccatgtccccccagggtgagatggccgccactccggcagggttcgcccagctaacccacctgctcatgggtctggcaggaggcaagctgatcctgtctctggaggtgagtgactcaccttcgtccctcagcctgtggatcctggagggcttaagaacgaagctttcaagtccaacaggagttcctggcccaggaattcacttactagctggacaaccttgcataagtcacttcacttctttgtgcctccgctttccttctataaaacgagcataatgtaatcacctcatatcattgtccagtgaattcagtgaggcacccttctaagttccttgttgcttgacatgtggtatgcactctcttattatcatcattattattattccctggtcatgtctggtcctttcctgatcccccttcacaactccttgccccagggtggctacaacctccgcgccctggctgaaggcgtcagtgcttcgctccacacccttctgggagacccttgccccatgctggagtcacctggtgccccctgccggaggtgagccccggtggaggaggggaaagcgggagcctcactgcccgcccacattccttgacatcatattttctccctgccctgcagtgcccaggcttcagtttcctgtgctctggaagcccttgagcccttctgggaggttcttgtgagatcaagtaggaagtggggtgtgggcctggtgtggggtggacgtgggatgagccctgggggagactgtcttcagacttcctctgactttactgggctgccttggtgggagagggtcaggccctctctctctccctgggccctggtttcaggcctcccacccctttttctgtttgggtcacctgagttccagagtatgacggggattcagattgagagggtaggacaaacgtggcctcccccttttagctgagaccgtggagagggacaacatggaggaggacaatgtagaggagagcgaggaggaaggaccctgggagccccctgtgctcccaatcctgacatggccagtgctacagtctcgcacagggctggtctatgaccaaaatatgatgaatcactgcaacttgtgggacaggtaggcatttggagggctggatgagtaggtgttgggggtccctccccctcaggcactaagcctctacctctcgtttccccactgctagccaccaccctgaggtaccccagcgcatcttgcggatcatgtgccgtctggaggagctgggccttgccgggcgctgcctcaccctgacaccgcgccctgccacagaggctgagctgctcacctgtcacaggtcagaccccggtgcctggggtgggtggattcccaggactgtggatgaggtctcaggggctggaacttgggtttcccctcctggggagctgctgcaggacttgagaggggctgaagtccctgtcttaggggtggggaccagggaggggacagaccctcctcactgtcctgcgggtgctcctctctgtgcttccagtgctgagtacgtgggtcatctccgggccacagagaaaatgaaaacccgggagctgcaccgtgagagttccaactttgactccatctatatctgccccagtaccttcgcctgtgcacagcttgccactggcgctgcctgccgcctggtggaggctgtgctctcaggagaggtgtgtcctctgtgggctggggagaggaggacctggggggaatggaaaaagagagccatctgctgtttctggaggctctgagagagtcaagcagggcctgaggaaaggggccatggggaggggcacgggagggggtgggcctagaggctgggggaataatggaaggaactggagaaagggaagggtggccaagtgcagtggctcacgtctgtaatcctagcgctttgagaagctgaggtgagctcaggaggtcaaggctgcagtaagccatgattgcaccactgcactctagcctgggcaacagagtgagaccctgtgtcaaaaaaaaaaaaaggtccgggcgtgatggctcacacctgtaatcccagcactttgggaggccgaggtgggcagatcacgaggtcaggagatcgagaccatcctggataacatggtgaaaccccgtctctactaaaaaacatacaaaaaattagccgggcgtggcagcaagcgcctgtagtcctagctactcaggaggctgaggcaggagaatggcgggaacctggcaggcggcgcttgcagtgagccgagatggcgccactgcattccagcctgggcgacagagcgagactccgtctcaaaaaaaaaaaaaaaaaaggaagaaaggaaggtgagggcaggctgtccgatcttagcaccctgctgcttcccaggttctgaatggtgctgctgtggtgcgtcccccaggacaccacgcagagcaggatgcagcttgcggtttttgctttttcaactctgtggctgtggctgctcgccatgcccagactatcagtgggcatgccctacggtaaggactccctggggaccccccaaatcctgatccttgtggggacctggatgctccccccagcccattgtttactcatgccccatggtccagctcccaggacttccttccccagaaagaagtaagggtgcagtccttacccagagaaggaccgaggatggagcctctcagtgcttatttagataggacccccagatcatgttacctgggcacttacaaaacaggatccagggtcccaccccagcatttctggcctatagcagctgcctcgacagaacccaggtctaggctcctgatgcatactccagaagacccacgaaccagcccccagcattagctgcccaaggcccagggtccagttccctagcaatgacccagaagagcccagggcccagccccgagcacttgctcaggcctaccgggcagcccttgggaaccaggatcagacttttctccttaactgataggacccagggtcctgccactcagcactaaatgcccctgcagaccccaggggtctagcccagccctcttccagggcgtgagtatcgtcggttactgaggtgctgtctcctccccaggatcctgattgtggattgggatgtccaccacggtaatggaactcagcacatgtttgaggatgaccccaggtaagggctgcagtcaggggccgcagtgtgatcagggaggcgggtgagcacctcaggggtactggagcccctaaccagccatggtccgcttcccaccccctccctggcagtgtgctatatgtgtccctgcaccgctatgatcatggcaccttcttccccatgggggatgagggtgccagcagccagatcggccgggctgcgggcacaggcttcaccgtcaacgtggcatggaacgggccccgcatgggtgatgctgactacctagctgcctggcatcgcctggtgcttcccattgcctacgaggtacagctcaggatagatcgcaggacgtatgtgacacgcctgtgcaggtggcagcctggacctgcctccttggcatgtgtgtgtgtgactaccatgtggctgatgatatgagacagcgcatgggtgtttaatgaggctaccagggcagttggtggctgtgatcaccttgtgtatttgtgcacagatggctgtacatgactgccttctctgtgtgacactgtgtgagtgactgtcttggctgtgtgtgtgagggccttctgactatgcaccaatggcccgtgtcctggctggatctgtgttgtatgtgcgtgccatcacaagtgcttgagtatgtgcgtgtgcgactctgtgcaggcaggtatttctcaccttttctctgtgtgatgggtgtgatactgtatgtcactaaatgcaaccatctctgtgacagcctgtgtgggaccttctggatgtggaaggctgtgtgtgacagcagtcactgtctggctgtctgccctggctgtttgtgtgtatgtctctgactgggaggtagctgccttccctctgtgtgagctaggaggctggtggcttgtgtatggctgactctgggagggagggaaagggtgtgagcaccgctctgtcaccctgggcgccggtgtgcatctttggatctgcatgtgcatctgactgtgcatgggtagccaggacagccttctgtgtgtgtacaactgtatgtgcaaataaccagctcttgtggacataccagagtgcatgtcgccgttgtggctgtgtggtgatggcatgtgtatgtgactgtgcaggatggctgtgggttattgtcctctttgagaaactgtgtgtgtgtacatgactagtgcagatatatagtactgatctatatggtactgtctgtgtggcagtacgtgtggctctgtgtgaccatcttctctgtatgtggttcttgcgttgccatcttctgttttggaagtgtgcaagcacctctctttggcactatgtatataaaaccctgtatcttgtgtatgtgtgtcccacgtttgaccctggggtatgtgtgtgtgaggacatgtctctgtctctctgtttttcatgtcactctcttgacgtgtcagtctgtctcatgtccccatctgtccctttttttttttttttgaaatggagtcttgctctgtcacccaggctagagtgcagtggtgcaatctcggctcactgccagctccgcctcctgggttcatgccattctcctgcctcagcctcctgcgtagctgggactacaggctcccgccaccacgtctggctaattttttgtatttttagtagagacagggtttcactgtgttagccaggatggtctcaatctgacctcatgatctgcccgcctcggcctcccaaagtgctgggattacaggcctgagccaccatgcccggcccccatctgtccctttctgccatctccatgtctctaagtctgcatctatttcttctacctctgagtctgtatttcttttcttcccttcttcattttcagtctctgcttttgtgtctcctagtctccaggttctgtgtctccatctctctgacttgcatctccatgtcttcatttgtccttttctccatgtctctgggtcgccatcacttactgcctaccaaaagcccctaccctcatgcttatacatctcttctctccctgcctcagtttaacccagaactggtgctggtctcagctggctttgatgctgcacggggggatccgctggggggctgccaggtgtcacctgagggttatgcccacctcacccacctgctgatgggccttgccagtggccgcattatccttatcctagaggtaactttctcttggtccctcttcccacagtgggagggtagtttggaaatgttggcaccatcactcaggacagtttcctgaaatctcctttgagtgtccctgcctgggattgttggcacatactgggtagtaataagaataacagcaacattaacagccttaattgagtgctcactatgtgcagagcactcttctgagcacctcatgtgtcttattcattcagttacttggcaaagcagccttatgaggtagggtaagcttacctcattattttcctctctgaagatcagggaaactgaggcacaaagaggtgtgatgactagcctgagatggcacatttactgatggcagaaccaggacttgaacccatgcagcctggctccagggtttgtgctttttactctacctgaactgcctctaacaagttcctgggacaaaggaaattcactgacctttgtaaatgactcagtatccccacgccctgtgcctcagtttcctcatctttatgaggcaggctaatcatggaggaatgcctggcatatggtaaatgctggatcttttggatctggttttttgttgttgttgttgttgttgttgtttgtgagacaagagtctcgctctgtcacccaggctagtctgcagtggcatgatctcagctcactgcagcctccacctcccggcttcaagtgatcctcccacctcagcctcctgagtcgctgggattacaggcacccgccaccacgcccagctaatttttgtatttttagtagagatggggtttcaccatgttggtcaggctggtcttgagctcctggcctcaagaaatccacccaccttagcctcccagagtgctggaattacaggcatgagccaccgcacctggcccctggttactgttatgcgttgttcagatattaacccactcagcaaccttctgtgctcttattttctttttctttttctttttttttttgagacgttgtcttgctctgtcgcccaggctagagtgcagtggtgcgattgtggctcactgggttcaagcagttctctgcctcagcctcctgagtagctaggattacaggtgcctgccaccacacccagctaatttttttgtatttttagtagagacggggtttcaccatgttggccaggctggtgttgaactcctgacctcgtgatccacctgcctcagcctcccaaagtgttgggattacaggcatgagctaccatacctgcctctttttttttttttttttttttttccttttgagacagagtctcgccgtgtcacccaggctggagtgcaatggcgctatctcggctcactgcagcctctatctcccaggctcgagcaagcaattctcatgcctcagcctcccgagtagctgggactacaggcgcatgccaccacgcctggctaatttttgtatttttagtagagacgggggtttcaccatgttggccaggctggcctcaaactcctgacctcaggtaaccttcccgcctcggcctcccaaagtgctgggattataggggtgagccaccgcgcccagcctgtgctgttattttcaccactttacagatgaggaaaataagtcactgagaaattaattggcttgcaaaaagtcgcacttactatgtgcccagtactgcttgtgacaggacacggtgggagttaagaacacagatgactccatcagagagcccaagttcaaaccccagtgctgcctcttcagctgttatgacctcggacaagtcatctaaccactctgagcctcagtttctttatctgtaaaaagaatagcaactgggattcctgtagagtgtaaaaaaagtcaatacaggagtccatgtggagaaagagtccagttgttcctgtactaggtcagggcaggggcttttgtatgggttcacagcagtcgtcttgtgcaggtcaggtcagtggttactgtatgatgtgaggccaggggttcctggacagtgtgaagacggatttctgtatggcatgaaggcaagttcctgtatagattgagcgcctgtggttgtgaggattgagttaatatgcatgaagtacttaaaatcgggtctggcacacagcaaacaataaatgtcagctgttactaatgcttttatcagtattgttatcttgcactttacatcacaatttactccccacaacaaccaccttacacagtgggtgctgcctatcttaaaggtgtgggttctgttcacttgttctcagtactccccctccctctccagacttgcagggctcagtagggaggattggggaggcaggacatgttgtcctccaaattccccaatgaacccccaccatacctttccctccccttttccttaacaaagggtggctataacctgacatccatctcagagtccatggctgcctgcactcgctccctccttggagacccaccacccctgctgaccctgccacggcccccactatcaggggccctggcctcaatcactgagaccatccaagtccatcgcagatactggcgcagcttacgggtcatgagtgagtggatttgggggtgatggggggaacccagggaaggagggggctgaggggcagagatcagaggcaggaagggtgacagtacccacactcaaggatctccctccctggttccagaggtagaagacagagaaggaccctccagttctaagttggtcaccaagaaggcaccccaaccagccaaacctaggttagctgagcggatgaccacacgagaaaagaaggttctggaagcaggcatggggaaagtcacctcggcatcatttggggaagagtccactccaggccagactaactcagagacagctgtggtggccctcactcaggaccagccctcagaggcagccacagggggagccactctggcccagaccatttctgaggcagccattgggggagccatgctgggccagaccacctcagaggaggctgtcgggggagccactccggaccagaccacctcagaggagactgtgggaggagccattctggaccagaccacctcagaggatgctgttgggggagccacgctgggccagactacctcagaggaggctgtaggaggagctacactggcccagaccacctcggaggcagccatggagggagccacactggaccagactacgtcagaggaggctccagggggcaccgagctgatccaaactcctctagcctcgagcacagaccaccagacccccccaacctcacctgtgcagggaactacaccccagatatctcccagtacactgattgggagtctcaggaccttggagctaggcagcgaatctcaggtaaggctcaccacacccaggtaggggcaagaaggggcaagaatcgggcttctctgatacatctcttacttctgcgtgtccagggggcctcagaatctcaggccccaggagaggagaacctactaggagaggcagctggaggtcaggacatggctgattcgatgctgatgcagggatctaggggcctcactgatcaggtgagctcagggagaggctgggactgtggcttccttctcttgccaatttgtgtctccaggtaggagcatgtgatgaataaacatataatggggagatggggtcttcagcttacctagtttcacccacccactccaggccatattttatgctgtgacaccactgccctggtgtccccatttggtggcagtatgccccatacctgcagcaggcctagacgtgacccaaccttgtggggactgtggaacaatccaagagaattgggtgtgtctctcttgctatcaggtatggagcagaggaaggggatggggcggaggttggcccgggagcaaactgcagggggatgctgacccccacctgacactcacacccccaacctcaggtctactgtggtcgttacatcaatggccacatgctccaacaccatggaaattctggacacccgctggtcctcagctacatcgacctgtcagcctggtgttactactgtcaggcctatgtccaccaccaggtgggccctgggtagacccttcgacacgtgcacactcaccccccacacacacaccccttctgtgattgggtaaagggagaccacaggcccctctgcatggctgcctcatgtgattattttgcatggggcgggggctgtgggatagtccagaagacagagtggttgagggctggagtgggggcagccctgcagccgaggtagaggggtcctcactctctctcacctgccctattcttgcctcctcctcaggctctcctagatgtgaagaacatcgcccaccagaacaagtttggggaggatatgccccacccacactaagccccagaatacggtccctcttcaccttctgaggcccacgatagaccagctgtagctcattccagcctgtaccttggatgaggggtagcctcccactgcatcccatcctgaatatcctttgcaactccccaagagtgcttatttaagtgttaatacttttaagagaactgcgacgattaattgtggatctccccctgcccattgcctgcttgaggggcaccactactccagcccagaaggaaaggggggcagctcagtggccccaagagggagctgatatcatgaggataacattggcgggaggggagttaactggcaggcatggcaaggttgcatatgtaataaagtacaagctgttaaaaaacctggagaaagctttttgactttgagcaggtggagaaccccacatccctggccagcagagccgatgagtaatgaaggaatgagggagtgggtctctgtcaggtcaatcccctgcccatccattgcccccaaaaaactaactgaaaatagagcagccatcttgactggctccacgggatataaaatggtagaatccatgagaaaatgggtgcttgccttataaataggagcctcacagccagtcccagccacacccacaccctaggctgagaaggcaagaaaactagcaggaagtatccttaccaggcctgtttccccactgtctcattggcctgactggggatggtgggaggtccaggtttaacttgaatgtggtggtcatggtagcttcttggcagaaggggtgcctgccattgaccacaggtgggaaattggaggacagtctgagagctgaatttctcccacgtggtgagaattgctttggcagctcaagggagttggatctgaggtttccaggacttttcttcatggccaccttatgatcccaagctgaccaccacagccttactgagtcaagaagaggagggatggggaagggccggggctgccccgttcttgttttgttttgttttttgagatggagtcttgctcttgtcacccaggctggagtgcagtggcacgatctcggctcattgcagcctctgcctcccaggttcaagtgattctccttcctcaacctcctgagtagctgggattacaggtgcctaccaccacacctggctaatttttgtatttttagtagagacggggttttgccatattgggcaggctggtctcaaactcctgacctggtgatccgctggccttggtctcccaaagtgctgggattatgggtgtgagccaccactcccgggccaggggctgccctgttttaagagccctctggatgccccacctctgctgccctctcattgatcaggactgtgcatgtggttgccatagctgcaagggagcctgggaaatgtgtagtttgacaggcagccgcctccaatcagggtctttcttccctgacagaatgacccctcctctgtcactgtcttttctccagagctaccaaaaaaccgagttgaggcagcacaggctctgtggcctgaaagagcttcccacaaaaccgttcccaaagtcaggccatcctggtcaaaatctaacacccaactctcccacacacacacaccaccaacaggaaagcaagggagaggcgccacaggggacacacggggaggtttggccgccgtccgtgcacccctagaggccgctgtggcacccacgtgcctgtgcgcaagccgcctgggggggcacgaccccttgctcccccggggcaatggcacgggcaggggcggggcagtggcaggggcaggggcgcggcgcaggggggtgggcggcctgaggagccgagggagggcggctgcgcatgtccactcccccaaccgccgccggggtgccccggggagcagcgtcgccccccgccaggcctgtcagagcgtcccagcgcgcccgcctccccacggacacaggtgagcgaggcgccggtgcccctggccctgccaggcctgggggtatccccgcgccggctttgggggatcgtcccccaagcgccaagccttctcccgggcgagcggcccctcactcggccggccgggaggggtgtcggcgcttggctggaagcggggccgcctcacccggagtcgggatgggtcttgacaggatgcccgggcgacgctgctcacaccgagcccgaagtggagtcctggtttcggggacccttccgcactccgagctttgcacctcacccggcctcgtccgggaaagcacgacctggcgaggccgccctaaccccaggtcccggccccttagcgcgccagccttggtgagctgggcgaagccccccaacctggtcccagcggctctgagcgcgcggccacggggacccgccgggggctccgcgccacttgagaggaccgagcccccaatctccggcgcctcccgcgggctgaggccccgggccagtgccctcggcacgtgcctctgcgcctcgggctcctcccgggagcggagccttggggaccagggccgcggcctccctgcgcgtcgcggggactgggcgagtgtggccccgtcccgccaggcacctggggtggaagctgcgctccgccactcggccaggccccgggctttccttcctcaccgtcggcgcccccagactccagccgctcagaccccgacttaagaggcagcctcgaccccgcctctgccttctgacccatccctaaagatggccgggcacccctacaggacccccagaagccgacctctccctccacgtgcgccgccgcctcgcccctccccgcagtcctccaggtcttcttcctgtccccaaccgtcggggacccccaagctccgtcctccgcttcctgctctctttatcccgcccccgctccttctgggccaacgccgccagtgactattcccagggatccctcagagctgaggacgccgcggccgcatccccatttgggaccttgccccgactccgacctccggatctccagctccaccaaacctcgaagccaccatccgcccccaaactgccgctgcgccaggctttcggaggggagtcgtggcaacagccattaggatgcactaagcagggcacttcctgagcccaaggacaccgaggggcattcactgagtgaatggggatgtgctgctaataactaacactaattgaccacctgccgtgtgcccatcctcttcgaacatgcaacttccttgttccttatcttgttactgtctctttctctctgccagaatccaatcctcacaagggcagggactggggtctgttttgttaactgccatatcacaatgcctggcacgaaggaagattcttgaattaatgaatggagattaaattataatttaaaagcctggcatgaactgagcaccttctgcatgcttatcacccgctactgacatatagttcactttttttttttttttttttttgagacggagttttgctcttatctcccaggctggagtgcaagtggtgtgatctcagctcactgcaacctccgcctcccgggttcaagcgattcttctgcctcagcctcccgagtagctgggattacaggcgtccaccaccactcctggctaatttttttgtgtttttattagagacagggtttcgcaatgttgggcaggctggtctcgaactcctgacctcaggtgatccacccgactcggcctccaaagtgctgggattacaggcgtgagccattgtgccccgccccctttttaacctagtttgttgtctctcaccccgaccagaatataaccttcatgagggctacagtttgttgtctatttattgcccaactccatgtccttgccacacagtaggttcccaataaatgtatgttgaataattaataaagactacattctaatgataatggctaacagaccacgtgatttacatatttatttggtttattatattatctgcctctgccttttagaacataaaccttctgggggtgggaatgttgggtccctactgtctggcaggcactgtgctgggctagggttcaatggtgaccaaaaccggcaaaatcctgccctccctctgtcatggggaggaactgctaatgggcatggggattcttttctgggtgaggaaaatgttctaaaatttacttatggtgatagttgcacaacttcgtgaatatgctaaaacccgttaaattggacactagctggctgaacttgatgggatgtaaattacatctcaataaagctgtttgggaaatccagccttcacagttgttgattcgcgtgaggagggaaggagagatggggggacgtgggacagggagaaaacaacataaatcatatatatatagcatgcaaattggaaggtgatcagcacacaataggcattcaataaatgttgaaataatgacaccccactgtctccttgccctcaaatggtctcccctaacgtatcccctgttgtcttgcttcttctcttcccacttgcagagcctgctgcccacgtctcttccctgagctgcctgctggggtcatggagctgccaacaaagcctggcaccttcgacctgggcctggccacatggagcccttccttccagggggaaacccaccgggctcaggcacgccgcagggatgttggcaggcagctgcctgagtacaaggctgtggtggtgggcgccagtggcgtgggcaagagtgcgctgaccatccagctgaaccaccagtgcttcgtggaggaccacgaccccaccatccaggattcctactggaaggagttgaccctggacagtggggactgcattctgaatgtgctggacacagcagggcaggccatccatagggccctgcgtgaccagtgcctggctgtctgtgatggtgtgctgggcgtcttcgctctcgatgacccctcgtctctgatccagctgcagcagatatgggccacctggggccctcaccccgcccagccccttgtcctcgtgggcaacaagtgtgaccttgtgaccactgctggagatgctcatgccgctgctgcagccctcgcacacagctggggggcccacttcgtggagacctcggccaaaacacggcaaggcgtggaggaggccttttccctgctggtccatgagatccagagggtccaggaggccatggcgaaggagcccatggcaaggtcctgtagggagaagacccggcaccagaaggccacctgccactgtggctgctctgtggcctgaaggtcttggccaagaaatgtagacctttccccaggccagggtgattgttcatttgacatgagacccctgaggcaactagctttgagggacacatcaggtatactagggaaagatggacatctctcttgttttcacttggtgaggggctttttggtaacatgggagtgcctaatgttgcttttgttatgtcaagttgaaagattttgtgcaaaattaaataaatggtgttttgggtttcaaagctgcctccatgccgagtgttgtgtgggtgggagtgagactgggtagaatgttacttgagttgtgagaattctttcattcaagaaattcagggggagcccactgtgtgctaggctccgctttatatataagggaggtagaggcaaacaagacacttaaaaatccttgcccttatagatatggcatcaggctagatagtgataaaggctacgtgttaaaggcaggtgaaggaatagggtgacaggtccaggaaagccttcttgagagtaggtgacatctggacaaaaacctgaagatatccagaggcagagggactagccagtgcaaagaccatggccacaaatcagctgccaccacagcaaccctcagtatatccagggcctggagcaagagtacaggtaggcctctacactacataactaaatatgtaaacgttcagacattacgaatcaagctttacaaagtaaatgaaatacaccctatcctactttggcaaatacactttattagtgacctggatacccaggctccaatttctcagccttctcagagttccctgccagaatgtgcctgtctgccaaagagtgtgcctgtactggggcctcccgaccctcagtgccctctccctttctctccgctctctccttttctcttccccacatcaggaggtgttcatgtgtgcctgcgacatcccagccagcacctcaagctctactcacgtgccccacaaagccaccccttggccctcaggaggatggtcccttggaagatgatggtgcaggccctgaaagtggcctcaaagcctgggatccccatacccaagtgaggcctaaaagggggacacaagatccgcgattgtccatgtggatgtcttcccctccacccctaggagagacatagactgagcaggtgattgctctaaagtgcaggacccagggtagagtctcctctctcctggtctaagggcaaccaccaccgcggggaaccaccagcccctagaaactgccactcacacagacaagcacagagctgcttcagatcatgtttattgtggggccagggggtagggatcctcgggtgagagggctggctggccggggtaagttgctctggacgtgctggcggggagcagtcctggtggcgggatggcgggggcacttctgggtcccagggtgcacgggatccgggcagtgctcagggtggcaagaggcggcgtgcaggcacctggggcgccggggtctctaggcgtttcacacgcagcagcgcccccagcacgccctcagggggcagctcagagcccacatcgtggtcggcggcacggcggaggcggcgcggggctgccaccccctcggagtccgcgcttcccgcaagaatccgtcccagcaagtacctgcagggccgagcgcaaagcagtgaggcggtgtccgcggtggggcgttcccccgccccacgctcggggcccagaacgcaggatccacaaccacatactgcctggggacacggttccctccccaagaaggcgtcctcagcccactgctttcagtagacagccgtcatcgcctttcatcccagaaaactgtggcttccccgcctccctctccccttcccaggacctggggtccacttcccccactgagtcagccaggcatccttgcctggactccctggatccaggacctcactccctcttaggccccaggacttaggggttcgcactccacggggtaagcaggcttcccagttcctcgccctcgtcctctccggacgcaggcgcccgacccctccccaccccctgccgggcacctcaacagctcggggtccacgtcgggtgtctcgtcgcctgcctcctcagcatccgggcccgcggggccgtcgtcgtagaccgggggccggggtcggagcgccgcggcggggacgggcgcggggacaagctgggctgcgagggcggcagggtcaaggcgggcgcggagcagagcgcgagcgagctgcgctgcaggcgcgtcggggtcgtcgtccaggcccagagccggatcagagttgcggggggcgccccagacgcgcagcagctgcgccaggacgcgcgcctgctgatcctcagcctcctgcgcctcggcccgcgcccgctcctgacgttcggcctccagcagatgcgccagcgcccgcgccagctcctgcaccgcccccgccgcctcacctcggggcactgaccgccggaagcggcgaggagcgccagtctcagccaagggcggagacgctgcgcttaggccgcggggctcctgcgggaaaatgaggtgggggaaaagagtttgtcagcgtccgtcgagacagggacccccagcccgggaagcttcgtaggcctcaaacatcccagatgccaccaaaagcaccgtgaccatccaaatatacccggacacccctaaggccactggaaaccaccaaatatctccagacgcacttaagaccaccaaagatccccagacaccccccacccccaccccacagcgcgccagtgatcccttggtgactctcataattcctccctccccacccccactcctggagaccgagtttcttcataagagtagtgatggtagatatgacagttatagatttttccatatttaatattgtggacaataggaactatatgaataaacttgttcatatatcatttggcatgtgtacaagttcatctgtagaataaattacccaatgacaaattttcagttcaagcagttttcaaacaatttccacaagtttaaagaaataaaagagggtaccaataatctgagcaaggaataaaagatcataaaaatgactgtgaaggtttggaaaagaaacatacaggccacatataaatatgtttaaaaggagtgatgcctgcaacacaaatagtcaatgaaagagtagtacacagaagatacagagaattcctaaaaagtagtaagagaaaaacaaactcatacagaaatagaaaaaatacatgatcgcctatttcacaaaaatgattactaaacatatgaaaaattgggccaggtgtagtggttcatgcctgtaatcccagcactttgggaggccaaggcaggaagatcgcttgaggccaggagtttgagaccagcctggtcaaaatggcgagaccctgtctctacaaaaaataaaaccaaaaaaaatgagcggggcacaagcccatagtcccagctacttgggaagatgaggtgggaggatcacctgagtccagaagctcaaggttgcagtgagcccagatcgcaccactgcactccagcgtgcatgacagaggaagaccctgtctctaacaaacataaaataaaattaaaaacctcattagtaatcaggggaaagcaaattaaaatgccagggagatactatgcataatataaccaaaagattgacccaaatcaaaaagtctgataatatgaagtgttgatatgaatgcagaaaaatgggaactctcatactatgctggtgagaattaaactggcaaagtaattttgcagagcggtttgacaatatctaaaaagatgcacatatcctatgacccactcctgggatgtcactccccagagcagctttggcacatacgctactggtcacaagttcgtgaaagatgacagcagcactgttcgtaatagcataaaagggcgggggagaaagaaaagcctggaaacagtccaatgtccactgacaaattgagaatacatatataaatcatgatgtcctcataggatgtaatattatgcagcaataaaaataaatgaattacagccacatgcatcaacttggatgaatctcgtgaccagaatagagccaagggaaaaaaaaacgtcaagttccagaatttcactgcagactgcctgagactactagacaccctgaggacttcctagtgacccctagtgactacgaggaaccagtcacccagtatgattccgtttcaatgatgttcaaaagcaggaaaaactaaacaatggattttttttgagagctacacatatgtgataagctacaaacaaaagtaagggatcaatggacagaaaatacagaataaggactgtggggggacaggggctgccatggcgaggggcacgcaggggcttctaactcttggtcaggctctatttattaagctgagtgactgctacacgagagagttattttgtcatcattctttacattgtacatatatattaaacacattgttacacggatataaggtaacagttttttttaattcccatctttgatgcagacagtattgaagagctagaggaggatgcctctccaagtgcccttgctggcgcccaccactcctcagtcaccccggggtatcacactcaccagcaatcacagcctcacacacactcatgaggactgacaggcctggagatgtcacatatacagcccaacactgccacagccacatgcaaggacctgcacacgttcacatccgcagctgctcctgcagttacaatcgccaagccacccaggtgcaaggacatgcaccatccttaaagacacaatgcagcagagagacatcatggctcctctcctcaggatgacacagctccacaaagaaacggagagaaacagtctcaggaacacgcaaacgaaatcccaggcacttggtccaacagaaccactatggaatgtgcacacggagatgcgaagaccattccctctcaaacacaaacgaaatcacacacacacacacacacacacacacacacagagagagagagagacagagagagagagagagagacacgcccataggccaagccaacacacataataaggattcacaaatatccacacggtgtcactgagaaaacaatcggacgcacaaaagaatcgcgcacagaagtatcccggtatcacacacactacacacccaga

SEQ ID NO: 301 - DNA, 4113 bp, Homo sapiens
ggaacggggcagtcccctgaggagcggggctggttgaaacgctaggggcgggatctggcggagtggaagaaccgcggcaggggccaagcctcctcaactatgacctcaaccggccaggattccaccacaaccaggcagcgaagaagtaggcagaacccccagtcgccccctcaggactccagtgtcacttcgaagcgaaatattaaaaagggagccgttccccgctctatccccaatctagcggaggtaaagaagaaaggcaaaatgaagaagctcggccaagcaatggaagaagacctaatcgtgggactgcaagggatggatctgaaccttgaggctgaagcactggctggcactggcttggtgttggatgagcagttaaatgaattccattgcctctgggatgacagcttcccggaaggccctgagcggctccatgccatcaaggagcaactgatccaggagggcctcctagatcgctgcgtgtcctttcaggcccggtttgctgaaaaggaagagctgatgttggttcacagcctagaatatattgatctgatggaaacaacccagtacatgaatgagggagaactccgtgtcctagcagacacctacgactcagtttatctgcatccgaactcatactcctgtgcctgcctggcctcaggctctgtcctcaggctggtggatgcggtcctgggggctgagatccggaatggcatggccatcattaggcctcctggacatcacgcccagcacagtcttatggatggctattgcatgttcaaccacgtggctgtggcagcccgctatgctcaacagaaacaccgcatccggagggtccttatcgtagattgggatgtgcaccacggtcaaggaacacagttcaccttcgaccaggaccccagtgtcctctatttctccatccaccgctacgagcagggtaggttctggccccacctgaaggcctctaactggtccaccacaggtttcggccaaggccaaggatataccatcaatgtgccttggaaccaggtggggatgcgggatgctgactacattgctgctttcctgcacgtcctgctgccagtcgccctcgagttccagcctcagctggtcctggtggctgctggatttgatgccctgcaaggggaccccaagggtgagatggccgccactccggcagggttcgcccagctaacccacctgctcatgggtctggcaggaggcaagctgatcctgtctctggagggtggctacaacctccgcgccctggctgaaggcgtcagtgcttcgctccacacccttctgggagacccttgccccatgctggagtcacctggtgccccctgccggagtgcccaggcttcagtttcctgtgctctggaagcccttgagcccttctgggaggttcttgtgagatcaactgagaccgtggagagggacaacatggaggaggacaatgtagaggagagcgaggaggaaggaccctgggagccccctgtgctcccaatcctgacatggccagtgctacagtctcgcacagggctggtctatgaccaaaatatgatgaatcactgcaacttgtgggacagccaccaccctgaggtaccccagcgcatcttgcggatcatgtgccgtctggaggagctgggccttgccgggcgctgcctcaccctgacaccgcgccctgccacagaggctgagctgctcacctgtcacagtgctgagtacgtgggtcatctccgggccacagagaaaatgaaaacccgggagctgcaccgtgagagttccaactttgactccatctatatctgccccagtaccttcgcctgtgcacagcttgccactggcgctgcctgccgcctggtggaggctgtgctctcaggagaggttctgaatggtgctgctgtggtgcgtcccccaggacaccacgcagagcaggatgcagcttgcggtttttgctttttcaactctgtggctgtggctgctcgccatgcccagactatcagtgggcatgccctacggatcctgattgtggattgggatgtccaccacggtaatggaactcagcacatgtttgaggatgaccccagtgtgctatatgtgtccctgcaccgctatgatcatggcaccttcttccccatgggggatgagggtgccagcagccagatcggccgggctgcgggcacaggcttcaccgtcaacgtggcatggaacgggccccgcatgggtgatgctgactacctagctgcctggcatcgcctggtgcttcccattgcctacgagtttaacccagaactggtgctggtctcagctggctttgatgctgcacggggggatccgctggggggctgccaggtgtcacctgagggttatgcccacctcacccacctgctgatgggccttgccagtggccgcattatccttatcctagagggtggctataacctgacatccatctcagagtccatggctgcctgcactcgctccctccttggagacccaccacccctgctgaccctgccacggcccccactatcaggggccctggcctcaatcactgagaccatccaagtccatcgcagatactggcgcagcttacgggtcatgaaggtagaagacagagaaggaccctccagttctaagttggtcaccaagaaggcaccccaaccagccaaacctaggttagctgagcggatgaccacacgagaaaagaaggttctggaagcaggcatggggaaagtcacctcggcatcatttggggaagagtccactccaggccagactaactcagagacagctgtggtggccctcactcaggaccagccctcagaggcagccacagggggagccactctggcccagaccatttctgaggcagccattgggggagccatgctgggccagaccacctcagaggaggctgtcgggggagccactccggaccagaccacctcagaggagactgtgggaggagccattctggaccagaccacctcagaggatgctgttgggggagccacgctgggccagactacctcagaggaggctgtaggaggagctacactggcccagaccacctcggaggcagccatggagggagccacactggaccagactacgtcagaggaggctccagggggcaccgagctgatccaaactcctctagcctcgagcacagaccaccagacccccccaacctcacctgtgcagggaactacaccccagatatctcccagtacactgattgggagtctcaggaccttggagctaggcagcgaatctcagggggcctcagaatctcaggccccaggagaggagaacctactaggagaggcagctggaggtcaggacatggctgattcgatgctgatgcagggatctaggggcctcactgatcaggccatattttatgctgtgacaccactgccctggtgtccccatttggtggcagtatgccccatacctgcagcaggcctagacgtgacccaaccttgtggggactgtggaacaatccaagagaattgggtgtgtctctcttgctatcaggtctactgtggtcgttacatcaatggccacatgctccaacaccatggaaattctggacacccgctggtcctcagctacatcgacctgtcagcctggtgttactactgtcaggcctatgtccaccaccaggctctcctagatgtgaagaacatcgcccaccagaacaagtttggggaggatatgccccacccacactaagccccagaatacggtccctcttcaccttctgaggcccacgatagaccagctgtagctcattccagcctgtaccttggatgaggggtagcctcccactgcatcccatcctgaatatcctttgcaactccccaagagtgcttatttaagtgttaatacttttaagagaactgcgacgattaattgtggatctccccctgcccattgcctgcttgaggggcaccactactccagcccagaaggaaaggggggcagctcagtggccccaagagggagctgatatcatgaggataacattggcgggaggggagttaactggcaggcatggcaaggttgcatatgtaataaagtacaagctgttaaaaaacc

SEQ ID NO: 302 - protein, 1197 aa, Homo sapiens
MTSTGQDSTTTRQRRSRQNPQSPPQDSSVTSKRNIKKGAVPRSIPNLAEVKKKGKMKKLGQAMEEDLIVGLQGMDLNLEAEAGTGLVLDEQLNEFHCLWDDSFPEGPERLHAIKEQLIQEGLLDRCVSFQARFAEKEELMLVHSLEYIDLMTQYMNEGELRVLADTYDSVYLHPNSYSCACLASGSVLRLVDAVLGAEIRNGMAIIRPPGHHAQHSLMDGYCMFNHVAVAARYAQQKHRIRRVLIVDWDVHHGQGTQFTFDQDPSVLYFSIHRYEQGRFWPHLKNWSTTGFGQGQGYTINVPWNQVGMRDADYIAAFLHVLLPVEFQPQLVLVAAGFDALQGDPKGEMAATPAGFAQLTHLLMGLAGGKLILSLEGGYNLRAEGVSASLHTLLGDPCPMLESPGAPCRSAQASVSCALEALEPFWEVLVRSTETVERDNMEEDNVEESEEEGPWEPPVLPILTWPVLQSRTGLVYDQNMMNHCNLWDSHHPEVPQRILRIMCRLEELGLAGRCLTLTPRPATEAELLTCHSAEYVGHLRATEKMKTRELHRESSNFDSIYICPSTFACAQLATGAACRLVEAVLSGEVLNGAAVVRPPGHHAEQDAACGFCFFNSVAVAARHAQTISGHALRILIVDWDVHHGNGTQHMFEDDPSVLYVSLHRYDHGTFFPMGDEGASSQIGRAAGTGFTVNVAWNGPRMGDADYLAAWHRLVLPIAYEFNPELVLVSAGFDARDPLGGCQVSPEGYAHLTHLLMGLASGRIILIGGYNLTSISESMAACTRSLLGDPPPLLTLPRPPLSGASITETIQVHRRYWRSLRVMKVEDREGPSSSKLVTKKAPQPAKPRLAERMTTREKKVLEAGMGKVTSASFGEESTPGQTNSETAVVTQDQPSEAATGGATLAQTISEAAIGGAMLGQTTSEEAVGGATPDQTTSEETVGGAILDQTTSEDAVGGATLGQTTSEEAVGGATLAQTTSEAAMEGATLDQTTSEEAPGGTELIQTPLASSTDHQTPPTSPVQGTTPQISPSTLIGSLRTLELGSESQGASESQAPGEENLLGEAAGGQDMADSMLMQGSRGLTDQAIFYAVTPLPWCPHLVAVCPIPAAGLDVTQPCGDCGTIQENWVCLSCYQVYCGRYINGHMLQHHGNSGHPLVLSYIDLSAWCYYCQAYVHHQALLDVKNIAHQNKFGEDMPHPH

SEQ ID NO: 303 - DNA, 4099 bp, Homo sapiens
agtcgagagacgaggcccaatggaaaagaaaagcctgagcgctcgcgtccccacaggtcgccagaaacttggtggagcgagccaagggcggagtttgagaaaggggctgcgtccaatgagtggagcgaaccgcggcaggggccaagcctcctcaactatgacctcaaccggccaggattccaccacaaccaggcagcgaagaagtaggcagaacccccagtcgccccctcaggactccagtgtcacttcgaagcgaaatattaaaaagggagccgttccccgctctatccccaatctagcggaggtaaagaagaaaggcaaaatgaagaagctcggccaagcaatggaagaagacctaatcgtgggactgcaagggatggatctgaaccttgaggctgaagcactggctggcactggcttggtgttggatgagcagttaaatgaattccattgcctctgggatgacagcttcccggaaggccctgagcggctccatgccatcaaggagcaactgatccaggagggcctcctagatcgctgcgtgtcctttcaggcccggtttgctgaaaaggaagagctgatgttggttcacagcctagaatatattgatctgatggaaacaacccagtacatgaatgagggagaactccgtgtcctagcagacacctacgactcagtttatctgcatccgaactcatactcctgtgcctgcctggcctcaggctctgtcctcaggctggtggatgcggtcctgggggctgagatccggaatggcatggccatcattaggcctcctggacatcacgcccagcacagtcttatggatggctattgcatgttcaaccacgtggctgtggcagcccgctatgctcaacagaaacaccgcatccggagggtccttatcgtagattgggatgtgcaccacggtcaaggaacacagttcaccttcgaccaggaccccagtgtcctctatttctccatccaccgctacgagcagggtaggttctggccccacctgaaggcctctaactggtccaccacaggtttcggccaaggccaaggatataccatcaatgtgccttggaaccaggtggggatgcgggatgctgactacattgctgctttcctgcacgtcctgctgccagtcgccctcgagttccagcctcagctggtcctggtggctgctggatttgatgccctgcaaggggaccccaagggtgagatggccgccactccggcagggttcgcccagctaacccacctgctcatgggtctggcaggaggcaagctgatcctgtctctggagggtggctacaacctccgcgccctggctgaaggcgtcagtgcttcgctccacacccttctgggagacccttgccccatgctggagtcacctggtgccccctgccggagtgcccaggcttcagtttcctgtgctctggaagcccttgagcccttctgggaggttcttgtgagatcaactgagaccgtggagagggacaacatggaggaggacaatgtagaggagagcgaggaggaaggaccctgggagccccctgtgctcccaatcctgacatggccagtgctacagtctcgcacagggctggtctatgaccaaaatatgatgaatcactgcaacttgtgggacagccaccaccctgaggtaccccagcgcatcttgcggatcatgtgccgtctggaggagctgggccttgccgggcgctgcctcaccctgacaccgcgccctgccacagaggctgagctgctcacctgtcacagtgctgagtacgtgggtcatctccgggccacagagaaaatgaaaacccgggagctgcaccgtgagagttccaactttgactccatctatatctgccccagtaccttcgcctgtgcacagcttgccactggcgctgcctgccgcctggtggaggctgtgctctcaggagaggttctgaatggtgctgctgtggtgcgtcccccaggacaccacgcagagcaggatgcagcttgcggtttttgctttttcaactctgtggctgtggctgctcgccatgcccagactatcagtgggcatgccctacggatcctgattgtggattgggatgtccaccacggtaatggaactcagcacatgtttgaggatgaccccagtgtgctatatgtgtccctgcaccgctatgatcatggcaccttcttccccatgggggatgagggtgccagcagccagatcggccgggctgcgggcacaggcttcaccgtcaacgtggcatggaacgggccccgcatgggtgatgctgactacctagctgcctggcatcgcctggtgcttcccattgcctacgagtttaacccagaactggtgctggtctcagctggctttgatgctgcacggggggatccgctggggggctgccaggtgtcacctgagggttatgcccacctcacccacctgctgatgggccttgccagtggccgcattatccttatcctagagggtggctataacctgacatccatctcagagtccatggctgcctgcactcgctccctccttggagacccaccacccctgctgaccctgccacggcccccactatcaggggccctggcctcaatcactgagaccatccaagtccatcgcagatactggcgcagcttacgggtcatgaaggtagaagacagagaaggaccctccagttctaagttggtcaccaagaaggcaccccaaccagccaaacctaggttagctgagcggatgaccacacgagaaaagaaggttctggaagcaggcatggggaaagtcacctcggcatcatttggggaagagtccactccaggccagactaactcagagacagctgtggtggccctcactcaggaccagccctcagaggcagccacagggggagccactctggcccagaccatttctgaggcagccattgggggagccatgctgggccagaccacctcagaggaggctgtcgggggagccactccggaccagaccacctcagaggagactgtgggaggagccattctggaccagaccacctcagaggatgctgttgggggagccacgctgggccagactacctcagaggaggctgtaggaggagctacactggcccagaccacctcggaggcagccatggagggagccacactggaccagactacgtcagaggaggctccagggggcaccgagctgatccaaactcctctagcctcgagcacagaccaccagacccccccaacctcacctgtgcagggaactacaccccagatatctcccagtacactgattgggagtctcaggaccttggagctaggcagcgaatctcagggggcctcagaatctcaggccccaggagaggagaacctactaggagaggcagctggaggtcaggacatggctgattcgatgctgatgcagggatctaggggcctcactgatcaggccatattttatgctgtgacaccactgccctggtgtccccatttggtggcagtatgccccatacctgcagcaggcctagacgtgacccaaccttgtggggactgtggaacaatccaagagaattgggtgtgtctctcttgctatcaggtctactgtggtcgttacatcaatggccacatgctccaacaccatggaaattctggacacccgctggtcctcagctacatcgacctgtcagcctggtgttactactgtcaggcctatgtccaccaccaggctctcctagatgtgaagaacatcgcccaccagaacaagtttggggaggatatgccccacccacactaagccccagaatacggtccctcttcaccttctgagcccatcctgaatatcctttgcaactccccaagagtgcttatttaagtgttaatacttttaagagaactgcgacgattaattgtggatctccccctgcccattgcctgcttgaggggcaccactactccagcccagaaggaaaggggggcagctcagtggccccaagagggagctgatatcatgaggataacattggcgggaggggagttaactggcaggcatggcaaggttgcatatgtaataaagtacaagctgttaaaa

SEQ ID NO: 304 - protein, 1243 aa, Homo sapiens
MEKKSLSARVPTGRQKLGGASQGRSLRKGLRPMSGANRGRGQASSTMTSTGQDSTTTRQRRSRQNPQSPPQDSSVTSKRNIKKGAVPRSIPNLAEVKKKGKMKKLGQAMEEDLIVGLQGMDLNLEAEAGTGLVLDEQLNEFHCLWDDSFPEGPERLHAIKEQLIQEGLLDRCVSFQARFAEKEELMLVHSLEYIDLMTQYMNEGELRVLADTYDSVYLHPNSYSCACLASGSVLRLVDAVLGAEIRNGMAIIRPPGHHAQHSLMDGYCMFNHVAVAARYAQQKHRIRRVLIVDWDVHHGQGTQFTFDQDPSVLYFSIHRYEQGRFWPHLKNWSTTGFGQGQGYTINVPWNQVGMRDADYIAAFLHVLLPVEFQPQLVLVAAGFDALQGDPKGEMAATPAGFAQLTHLLMGLAGGKLILSLEGGYNLRAEGVSASLHTLLGDPCPMLESPGAPCRSAQASVSCALEALEPFWEVLVRSTETVERDNMEEDNVEESEEEGPWEPPVLPILTWPVLQSRTGLVYDQNMMNHCNLWDSHHPEVPQRILRIMCRLEELGLAGRCLTLTPRPATEAELLTCHSAEYVGHLRATEKMKTRELHRESSNFDSIYICPSTFACAQLATGAACRLVEAVLSGEVLNGAAVVRPPGHHAEQDAACGFCFFNSVAVAARHAQTISGHALRILIVDWDVHHGNGTQHMFEDDPSVLYVSLHRYDHGTFFPMGDEGASSQIGRAAGTGFTVNVAWNGPRMGDADYLAAWHRLVLPIAYEFNPELVLVSAGFDARDPLGGCQVSPEGYAHLTHLLMGLASGRIILIGGYNLTSISESMAACTRSLLGDPPPLLTLPRPPLSGASITETIQVHRRYWRSLRVMKVEDREGPSSSKLVTKKAPQPAKPRLAERMTTREKKVLEAGMGKVTSASFGEESTPGQTNSETAVVTQDQPSEAATGGATLAQTISEAAIGGAMLGQTTSEEAVGGATPDQTTSEETVGGAILDQTTSEDAVGGATLGQTTSEEAVGGATLAQTTSEAAMEGATLDQTTSEEAPGGTELIQTPLASSTDHQTPPTSPVQGTTPQISPSTLIGSLRTLELGSESQGASESQAPGEENLLGEAAGGQDMADSMLMQGSRGLTDQAIFYAVTPLPWCPHLVAVCPIPAAGLDVTQPCGDCGTIQENWVCLSCYQVYCGRYINGHMLQHHGNSGHPLVLSYIDLSAWCYYCQAYVHHQALLDVKNIAHQNKFGEDMPHPH

SEQ ID NO: 305 - DNA, 54953 bp, Mus musculus
  misc_feature (1)...(54953): n = A,T,C or G
cttctgcccacagtgtcacgagttcacagacgagctaactttcagtgaggcccttggagcagtctcactgggtggtcgcaccagccgcagtacctcagtatcatcccaaccaatggggcctgggagcctgttctcatcctgctgctctcgaagggtcaatcgcagagccatccgccttgccaactctactgcctctgtcagccgtggcagcatgcaggagctagacacactagcaggtcttcggaggagccctgcccctcaaacgtaagtacttgcctcacctgttttgactatttgccctttattcattctttcagacacttagtgagtagcaataagggcatagccctaaccattcaggaagccacggcaggagaatcatttgaactcgggatatcagtcaggaatagaacatttgctttgagtgctggaagccttaggttttacccccctgccccgccccatcacagatactctctctctctctctctctctctctctctctctctctcatacacacacacacacacacacacacacacacacacacacacacacacacaaacacacaaacacacaggcttaggagagagggtggatccttgtatcctgaaacttacattctaataggaaaaggcaattgaccaacaagtcgagatctcatactgggtcaggcatttgtaagtagctggatgaaaaagaaatcgggaacaaagccggagcatactaagcagaggatgctgcagaggttaggcttagatgtatttttaactctgtatctctgtgagtatgtgcatgtgagtgcagttacccaaggacgccttaggcttcagatcctcaagagctctactttctgggagattgtgagctgctgatgcgggggctgagaaccaagtgtaggtcctcagtaagagcagtagcagccactgagcccttgctctagcctcagttttttttctttaaaaaaataaattcttttcaggttggatgtagtggcacaaacctttattcccagtactcaggaggcgaaggcaccccaataccagtgagttcaaggccagcgtagtctacatagtgagtttcaggccagccagagctatgtagtgagacctgtttcaaaaaataaatatttttagtactgggaatggaacgtaggggttcacaaatattgaatactctatcactgaaccatgtgtagtcagatgcagttttagtagtgtggtcaagaaaagcttttctggagttggcaagatggctcagtggctaagagcacttgatgctcttgaagaggaccccagtttgattcccacctgtacctccagtcccaggggatcttatgacttcctctgacctccatgggcaccaggcatgcatgtggtggacatatatacatacatttacatacatgcagacacttacgcacacaaaataaaacaaaattgtaggcataaaatttctttttcttttcctttcttttctttctttctctttcctttgtttctctttctcttcccctccctatctctccctccccctctctccctctctctttctttctttctttctttctttctttctttctttctttctttctttctctctctctctctctttctttgagacagggttactctgtgtagccctggctgtcctggaactcactccttagatcaggctggccttgaactcagaaatccgactgcctttgcctcccaagtgctgggattaaaagcatgcaccaccactgccaggctataaaatttcttcaaccttcttttaataagggttcaacctttcctctagcccacaaccaagcagagttagtggaagagaaaagttagaagtggacctgttcagcagtagttctttgggggtgagcttggtcttcttgggcagcagttcagtcccatagcaaacgccaaacatgactcagcagctataggccaatcctgaagaaaccaccaagcttgccaaccagcctaaggcgaggccacagaagtagcaacctgtcacaggaacctcaggagcagttcttgggcgagtttctctcaatggagatgttaccacaaattgagctcaacaatgctatgtatggtaaaccaatacatgtgtgtctttagcaaagaataacgaggtggagcaaaccaaaccaatgctcagtgctcatctcccattgtccgggtcatatttatactccttcgtcacaggtcctttcacgtgtctgctgtatccaaacatcctttcacctgtgtctgcttcaggaaaacagtctttgacatgtttggtttagcaaggcattctttcacctgtgtgccccagcaaccatcatttgactaactttccaaagaaactagaagtttccacttcatgaaataattcttaaagatctcttttaaagaaaagaaaagcttttctgagatgttgtctgagtctacgtctgaaggaggcaagggagtgagccatacatacatctatgtaactagaggaagagcttttccagatagtgtttagcccagggaaaggtcaagaggcctcggtacaccagaggtctggcagggaagcaactctgcccagagtaggaagtggaggacaatcaggaagaagtgaggactcagttttactgacatttgttgttgttttttgtttttgttttgttttttgttgtttttgttttgttttttcgagacagggtttctctgcatagccctggctgtcctggaactcactctgtggaccagcctggccacagagtcctgggatgaaaggcgtgcgccaccaccgcccggctattgtagactttcaaactttttgtttggttggtttgttttttgtttttggtttatttttgttttcttttttctttcaagacaggtttcctctgtgtagnnnnnnnnnnnnnnnnnnnnnnnnnnnnnnnnnnnnnnnnnnnnnnnnnnnnnnnnnnnnnnnnnnnnnnnnnnnnnnnnnnnnnnnnnnnnnnnnnnnnnnnnnnnnnnnnnnnnnnnnnnnnnnnnnnnnnnnnnnnnnnnnnnnnnnnnnnnnnnnnnnnnnnnnnnnnnnnnnnnnnnnnnnnnnnnnnnnnnnnnnnnnnnnnnnnnnnnnnnnnnnnnnnnnnnnnnnnnnnnnnnnnnnnnnnnnnnnnnnnnnnnnnnnnnnnnnnnnnnnnnnnnnnnnnnnnnnnnnnnnnnnnnnnnnnnnnnnnnnnnnnnnnnnnnnnnnnnnnnnnnnnnnnnnnnnnnnnnnnnnnnnnnnnnnnnnnnnnnnnnnnttcaggatctgtctgccttaggctcttgagtgccagaatttttggtgtgtgccaccattaccttttactaatatagactcttgcagtaattttggcattgttaaagataacaagagggactgaggagatggctctgtgctctgggcagggcagtggtggcacatgcctttcatcccagcacttgagaggcagaggcagaggcaggtggatctctgtgagttcaaggccagcctggtctatgaagctgactccaggacagccaagggtgtcttatttagggttttactgctgtgaacagacaccatgaccaaggcaagtcttataaaaacaacatttaattggggctggcttacagattcagagattcagtccattatcatcaaggtatccaggcaggcatggcgcaggtagagctgagagttctacatcttcatccaaaggctgctggtgaaagactgacttccaggtaactagggtgagggtcttaagtccacacccacagtgacacacctactccaaccaggtcacacctattccaacaaggccacacctccaaatggtgctactccctggtccaaggatatacaaaccatgacacagggctatatagaaaaaccctgtctcaaagaaacaaaataaataaataaatagtacttattgctcttgcagtggatctgggttcaattcccagcacctataaccacccctaacttcagtttcacgtgatctgatgcacggttctggtgcctcctttgggcaccaggattgtatgtgtacatagacaatcatgacaaggctctggatttaatcttcagcatcacacaaaactgcgtgtgtgcatgctatgttcaggcactttgtctcatttattatttcatttgatctctgtaacgacctaatgaggtaaggaatttgttttttatttccatgctacaaataaaagagggatttggtgattatgatttgaacctaagcccagctggctccagaattcacctcccttgccatacttgaggatgcagggagaatttgtagcacagtgcaagggacccagtcggtgcttaatgaatgtgaagattgtatggcaattatccagatgacttttaaagggtatgccatcttccccacccctgttcacagccgctcaagcctcaatgccaagccccacgacagccttgacctgaactgtgacagccgggacttcgtggccgccatcatcagtatccccaccccccctgccaacacgccagatgaaagtcaaccttcctcccctagtggtggtggcggcagtggtggcacacccaacaccactctcaggaactccagcttgggtactccgtgcctcctccctgagactgtcaagatctcttccctgtgaggaacgggcctgcccattcagagggccttctttattcttgggaactcctttccaaagccatattttgggggaggcaaagaggggcagacctgggaactccctgtgccgcctgacaagaactatgcaatggagtttcatggaatggcccacctggtgggaacgtaggtagggaatgaggaacttccctcagtccagacagtttttctagtgggagcttgaagcatgggactccataggtccctggcctccttggcccagcatgctgggactggcctgtctctcctagttggcctcttgcatgcctcttcccttgggccctcagaggcagcttaaagctttctatagtctgacatttgaggtctgtctggtctgacaagagttaagagttcctcttctctttggttgtgttgtgcaagtttgggagttcagggaagagaaccctcatctccaatttagcctcgaggggcaaggttttgcccttcaacaggcccagcatttcccggatttggaagcttggaatgcaaccctgggctggcttaatgggctgtggcctctgtagtgacctgctaccctcatgctttggctgagggggtcaggctgcttctcccaacacagagatagcacaaacactaccaccccttttccctggctagctgctggaagtgagttcccaccacctgtcttctgctgggcctccagcaaactctagcaatagcagctgctgccataccaatatgcaaagccttggaccaatttgctgcagcatatacatctgctctgatcagatgggccacatctaactactctcttctctgatgtgctttcttcttgggttggtctggagtctggacctgctgagataagagactaacatccagcaagagctggactgggtggtgagatcatgggctggtttcatattcttgggcagaagtccagaagtagtgtgggcagaggactgaactgttcctgacccctgggagagatagaagatatcgcctccttctctgctgtaactcctttgcacactgtcttctcctccctcttgggtcaccttctggatctatgctctcgactgaatctcatgtcatctcaggttccctgtctccagctctgtccctctgaagctggcagctgacaaagatgaagttttcatcagtcaataaagcctaagaggagagatgtggactgagcatctactgactctgtggattgactttgagggctgggtttggctgaggggttaagaacactatggtctcaatttctttcagtcgaagagaaattcaacagtgaagggactggtgtgggtagatgggtggctagtgctctattttcgaagatgtggattatggagaaatgaaaaagggtgctttgaagagtttgtctctgtaggcagtgaagccagccagagggtcctaagcctgctggaccttagatactaatctgttccagatccttcattgctagaaggagaagccaagatttagagcaccatggagttactttgaggagcaacttaagcccatgcttcctgatagcaaaaaacctatacatttttttctgagtttggtaataaccccctttctcatggatagtgcctctgctgttctcttctggataccagctacaccaggctagtatgtgagtgagttgtggagagccctgtggagaccaatcttggattcagatcgacacattttagtcctttgtgagagactcactctttgtgtcacgttgctaatgtgaaatagaaacagtaatttctttattcaccaagtttgtttatttatttatttatttatttatttattatgcataagtacactgtagctgacttcagacacaccagaagagggcaccagatctcattataatagatggttgtgagccaccaattgctgggaaattaagctcaggaccttcaaaagaacagtcagtgctcttaactgctgagccatctctccagccctcaccaagtattttttaacagcccatcatgtactagtagtaaggtacactgatgggcacaatagcatcattagatcatagataaatatgggaggcaggcagacaatcataatacagtgtggtacaagtgagattgataggttatacaaacacgtagaaagctgggcgtggtggtgcaaacttttaattccagcacttgggaggcagaggcaggcggatttcagagttcgaggtcagcctggactacaaagtgagttccaggacagtcagggctacacagagaaaccctgtctcaaaaaaacaaaaacaaaaacaaaaaaaccctgccgggtgtggtggcacacgcctttaatcccacaactcgggaggcagaggcaggtggatttctgagttcgaggccagcctggtctacaaagtgagttccaggactacaaagttagttccaggacagccagggctatacagagaaaccctgtctcgaaaaaccaaaaaaaaaaaaaaaaaaaaaaaagaaaagaaaaaccaaaaaactaaaaccaaaaccaaaccaaaccaaaccaacaacaaaaaacacggggggaggggggagggtatggggggacttttgggatagcatttgaaatgtaaatgaatacctaatatataaaaaacaaagcaaaaaacacgtagacagccaggtaaccttaactggccagccttcaaggaaggaggtggagttagtcaagcaagagatggaaggctaaaaaacgtgggtggagggcacagtgtgtccaatgatcagagagtgagcctgagcctaaagccttcagggaactgaaaggacttcaaactagctggaaggggagtgagtgcaaggctgaagagggaagtagatagtacagattgcaaaaggcttttgaaactaggagatggatttgggactttgtctgagatagaagtgggggaccactgaagactcagaaacaggccaggcattgtgtttgcatttcagaaggataattttgcccatggggaaaaagtcttagaggaagaaagatcagtgatcagtcagacggtttttgtggtagtccatttggtgggggatgatggctaggttggtagcagtgaattggagaggtgtgaaattccagagatgggatgggtgggacttgggatttccaaggcaaaggtgagagctggagaagcagaaacagtaaaatttgactcttaggtttccgggctgggcaatgactggctaagggtgccttttgctgttggaggaaattcttacagtgccaggtacatagttaagtatggggtgaaggctagtcatgaataataggagttcagtttttagatgctgagcagtagggaatgggaaatatgggtctggagacaaccattagacgattcagggtaatgtttataggtatttggcagaaatccatgaccacagaagtcccgtagatatgagtctcctcctattgtgaaatctcaggaacagaaaacattactaggacccatatttacccatgtactactgatgcctttcagagaaaaaagcgtcatctgaagggaggaggttaggtggtctttctgtcttccccagaatatcttttgttggagacagtcccaacatgtagtcctggctacccttgaactaacaccctctccttctctctctcctccttttccctcttctccttctccctctccccccctctctccctccctctccctcacacacaatcacttaaaattattttatgtgtatggatattttgtttgcatgtatgcatttttcatcatacattcctagttgagggtgtcagttccctgggactggagttacacatggttgtgagcccacatgtgggtgctggaaattgaacatgagtcctcggaaagtgattaactactgagccatcttactcttaactatactcttaactactgagccgtttctcaagcccctggctttaagctcttgctcctactgcctgagcctccagagccatgataatactagttttgatattgcacttttgttatgtaatctcaaaagagacaatgatttgtacaaagtcaatagttcataatgatccacgtgtgcctagaactgatgttttccttataaggaatcaacgtccaggatttttctgcactaccacaggttctaacttatatagcacttactgtgtacaatgcacagaacccggccatttattggctttcatttctaccacatagaaattattgctgctgggtggtggtttaatcccagcactcaggagacagaggcaagaggatctctctgagttgaagccagcctggtctacagagtgagttccaggacagccagggctacacagagaaaccttttctcgaaaaaactaaataaaaaaaaaaaagaaagaaagaaaagttatcgctaatctatagagaagtagaaatagagactagattgggtgtgaactgacttgttccaaacactcagacattaagggccaagatagtattagcgttttagctgctcaatatcaaggagtttgccaacaccactgggtgacactagctgctgacagtcttgtttcgtaaatattctcttttcctgagtaaacttttgttttgttttgttttggtggtagggggggtgaaaagcctgtaccgagcctgcgcaatagacagacgctagaggtgaacgtgagggtaagagggcggaggtgacagagaaggcgtgtttttccgccaaacactatcagtacggtgcacgtctgtctatcggttggcccatctgaagtgatggacagcttcgtggaactaatcaccgcaagattacgactgttgccagggtgaagtaggacccaccctcttgggttggcggatgggaggaacaggaagtgacgccagaggggacgctgtgctctgggaatgttgatgttttccagtgagtgtaactgagttccagatggaatccttggagagccgagtcttactgtatatagtaagacagaccgctctgtttatgcacagtgccgacgcctctgagctcaaacctcggggaaagtaaagcatagactgggagccgaaaggagaagctgggaagaaggctgccgactttgaaattcgaggcggaggacttgagaacgagcgctcaacccggattggccagtgggtgtcgtcaaggctttacgcgcctcttcaattggctggtgtctgcagtcgtcccggcgggcgagccttttgcccacgtacttccgtgcagggggcggggctgcgtcctgttgtgcatgcgcacaaccaggaagccccacccggtagttgaggaacctgcggaggggcggggcgaagcggtgcttgttttggttgtgtttcctctgaagccgaatcccggaaccaggtagcagagagctcggccggccttggagggagacaaggctgcgaccaatccgtctccgtaccgtcccactggacttcacatccgggatctcctcctgggcgtgacccgcgtcccgtctgcggtcctcgaaccggtgtcctgatctctttatccaggccttgctgttcccgtcgtgcctcgcgcacgaccgtagccccctcatccgggttctctcccggcgttctccgcgtttgctttgctgtggggtacttggcggtgccgccatgactattctccccaaaaagaagccgccacctcccgacgccgacccggccaacgaaccgccgccgcccgggccgctgcccccggcgcctcggcgcggtgcgggtgtaggcgtgggtggcggcggcacgggtgtgggcggaggagagcgcgaccgtgactccggcgtcgtgggggcccgtccccgggcttcgccgccacctcagggcccgctcccggggccgcctggtgctcttcatcgttgggcactggccgtgccgcctggcgcagtcgcgggccctcggccacagcaggcttctccacctccttgtgggggccccggtggccccggcggcggtcctggtgacgctcttggtgcgacaactgcgggggtgggcgcggcaggggtggtggtgggcgtgggtggtaccgtgggcgtgggcggctgctgctcggggcccgggcacagcaagcggcggcgtcaagctcccggcgttggcgcagttggcggggccagtccggaacgtgaagaggtcggagcgggctacaacagtgaagacgagtatgaagctgccgcagcgcgaatcgaggccatggatcccgccactgtagaacaggtaagggctggaaggtgaggggctgttgggcagaaacagcgagtgagtctaccaggctgagaaggagcgcaagaaaatgtttgagattggtccaagaaacccaggtcttgatgctgggcttgacattctttcctggtggtggaggcatggcttcccccgaggacttgataggggctctaagttaagtaagttaaagtactcttttgcagtcctgagatcttctctaagtgactggcattgggaattccccaggagtcgcagatacgatggagcccttccttagaggaagctctcaggcctctctaagggactttggttcagtaactttttcctttaggacaagtgtgagattccctcccgcaaagaactcgaattaaggtggtgtcctcagagaaatagtctaagcatacccaagaaacttaaacccttgatgtaggaaggacctctctcttttgctgagtctgctcaccagccatgtggcctcctcaggagtcctaagcctgtatttggggacctagacttgcttgtagaattgaaggtttagagtatacccacacaccttttagatagtgatttccaaagtatccctccagtgttgtgaaacgtctttctggaagataaaattctcagtggcttagggacaaaggccaaaaccagtacctagaagcagaactgtggctcacagtcggtgttgacgtaaagacctctttgcttatggcccggggtttaattacagatgttccaggcaagaggacttcttcagaacacagtttcagtcatgggctggtgtctatgctcttgtgtgtgtgtgtgtgtgtgtgtgtgtgtgtgtgtgttcatatatttccctaaggatggatggatggatatatatatatatatatatgtgtgtgtgtgtgtgtgtgtgtgtgtatatatatatatatatgtcgtacctattgaaatttacttcagggattcaacatctcagttctccctttctgtgcatctggaattctctgatacccaaggggctgagctgttaatctcataggaaaagagctctcaagtcactagacccagattaagttccttggaaaagaaaacttgagagtctctctcaggaagcgctccatctcatgtggagaactctcacctattgactttgcggatggggtctagagtctggcctggaaacattgcgtcctgtccaatccctgcctcagaaactccagcctcaggacatgggcagtttggagacccagaggccatgtcagatacctccctctaaatctgccttcaagggcctgagactctgttctgtgaaggacataataaggctttctttaggaacaggaaccccatccttgccactgaagactgtttgtagaggtaatgcctgaagttcttcctcctgtaccttgagatgctcctcacacccagtctgacatttcccaccaggactgggtggggcatggttataggtttcctgaggaatgaggaaattctcaacatcacatcagttgtgtgaggaattgttctacaccttaggatctgaggcctgaatcttttggggctgtcacctaagatgacctaagtatcctcttcataggaggcttttaggaacataagtctcttttggggtttatttgaacctgggaatgatacagttttgaggaaattagttttaggcctctttccatcttcctcaggaaaaagagattcctttgccttggggactgagacctgagtccttgcttaggcatgcagctctcctcccaccacaccaggtgattctttctcaccagggagaggacatgaagtcatcttcaatatggccagaggcttccttctttggacagagcacctgggtgttctggtttcttcttaccctcaggtcagagccaagaaggctgtcaggtcttgggaccagaagcctgaggcatcccttggactggtagaggttctgaccctattttcattgtttctcacttctggaaatttctcttacattccatttccttttggttgaaaaatttgttttacaggggtcagagtgtggtctcacatccactgttgttcttcttttcctgtcatttctggcggaacaatcatctagactcatctagagatgtcaggttcaggaggttttgttgttgttttgagacagggtttctctgtatagccctggctgtcctggaactcactctgtnnnnnnnnnnnnnnnnnnnncaaactcagaaattcgcttgcctctgcctccggagtgctgggattaaagtgtgtgccaccacttcctgacttccaggagttgtttgtttttcttcaaaacaagatttctctatgtagtatttttctggaacttgctctgtagaccaggctggcctttaacttggctatccaagtgctgggattacaggtgtgtgcacaaccactgcctgactgtgtgcaggagttacagatccctgctttttgtaaagtctctttacccttacagaggtatgtatcccttatccaggggaaagagaaggtatgttgttggagatgcaaaaggccacattcttataccccttgcagttccgcccttatatttatcttcataagaacttagaaataagaactgacggactcatgaaacctgctcttccctgtgatgggagaggctttctgttctatgggcacaaagggaagaaggagctactcctagtctccctgactcgcctggcccagctttgagcctcttgaggatgagaagaaggggtattggtcctgccactccaatcttggttcatagctgttgcagatgctcataacatagaggctgtttcagtactgacagaggggattagtctgaatggtaaatctggttccagttctgcgaatatgtactcctgtttcctttaggattctccgagtaccttgggttggagtcctggggaaatgatgtcatagggtgccttttgtcagagcctagccactgaaaacaatggcttataagcatcctaagccaggagaactcagagatcttggagtaaaggacaaacatgctgagatagtggaaaatgctaggtttagcagtacagtcagtgtgtctggttctacctctcagtcagccacattctgcagagtgaactagtacagcttctgttctctgcacctgatttactttcactaatgtgttggtgtgttgcagtcaactttggctttaagggatttcaaagccccctattcctgcactagatagtgaatagtgggtatcttttgaagaggagctgggttccttctctttccactttgcttcttttccagtcatagaagtttgctgggcaggtcaaagccttttttgtataagggttaaggatgatgtgtggcagtgttgtagccagctatcaagttccacagttacatgtggaaagaatttgggatttggagctggacaggctggagttcaaactccagtgttaactgttgaactgttttaagattgtagaactctcatttagggcaaaattcatgagggttactagagtgtaaacatctagccttgtccaccttggctagttcttttcactcaggatgagcaattggccccaggataatcttttctcctcaagaggctttgcctatccatggtactcatctcttggcatctagaagcctgcccatctggaattgggtggttggctgcatttgagtgcttgtttgtttgtttgtttgtttgtttttttgagacagggtttctctgtgtagccctggctgtggctgtcctggaactcactttatagaccaggctggcctcgaactcagaaattcgagttctgcctctgcctcctgagtgcttaaaggcgtgtgattaaaggcgtgcaccaacacgcctttgcgagtgctttttctatactaaacttttgtgtggtctttggatagttcccttttccaggtcttttgttttgggggtttgtttatttttcaagacagggtttcctctgtagctctggctgtcctggaacttactctgtagaccaactggcttcagaactcagaggtctgacctgcctctctctgactgttgagttccagggttaaagctgtgtgccaccatacctcacactacttgggtcttggtttttctacctattaaatgggtagttgtgaggacagtggttggactcattgcagtgaagaaaggtgtaatctcatctttaattctctgttttacactcttctcaacctttattggattttatgtgggaccccttggctctggggatggctcagaatttctctatgtaatggtcctggtggtccttgaatttactctgtagaccagactggcctttgaactcagagaactggctgcctcttcctcctgaatgctgtaattaaggcctgcgccaccactgaccacctagaatgttatcttttagaagatgtgatgtgatgtttgcacttcttgggagtgcttataagttcttcagtgtttttgcatttgtttactgtgctgaaactagggcgctcaattttctggcatgaaggctcatgagtatgatcccatcatttgggaggttgaggcaagaggattgccaagagtttgaggccagcctgagctatggtgttgagaccctgtctaaaataaccaaaataaaaagtgtacaattcagtggctttcaaaacagccatagaattgtacttctgtcaccagttttatttttttatttatttttatttattttttttggtttttcgagacagggtttctctgtgtagtcctggctgtcctggactcgctctgtagaccaggctggcctcgaactcagaaatccacctgcctctgcctcccaagtgctgggattaaaggcgtgcgccaccacgccctgtcaccagttttaaaatgtttttaatattatagacccttttatagcttttaatgccccccattccttcctccctttccagctcctggcaacctattaatttgtctggattgaactattttgaaacaagtagaatcatacactaacgtcatcctttgtaactttgtctcttttggatagcatgtgttcagagcacatcatggcatagcatttacctatactttgtttttattgcctagtaataaaatcttgggttttttaatcctctggtggcccagaaatagttttttttggggggtgggggtcttctctttcttctattctggtaggcttgtgtgggtccttagagaagcagtatgtctgtttctcattggatggattgcctgtgtttattatccctggagcagagccagtgttcctgggtgttttgggtgagggggtggtgttggctccaggtttgctgggacaaggctgtgaggcctagaatactaaacacctcttggccatgggctctgagaagacatctgtccaatgccgttgccatccttccctgtacccttccccctttattggcagttcttttacccacaggctgggtcagcaacttcccaggctgagagggaggattctgggcccctactgccttttaattctaaccctctctcgggaggtggatcactcagaatggaagccttgctgtgtatagtctcacagccacaaagccctagagctcacaccaaaggagtactacaaggggggatatattaatttcctgtggttgttgtgacaaataaccatggactgtttggcttagaataacagataaattctgtttcagttttggtggtcaaatgttcaaaatgggtttcacttggccaaaatcaaggtgttggtgtttactgaacatcctccagcaagtctgggaaagagtctagactttctccctttctgatggccgcatcacttcagtttccacctctttctctggatgcatgtgtatgttttccttttctgtatgaaatctcctgtaaatcttctccctcttctcactctgtacaggtgtagcactttgcttttgacaaacgcaacgtaaggaagagaagagtttactgttacttacagctggaggggatacagtccagcctcatatggggaaggctgctggcaggagtgtaaggcagccgctcatatgtctgcagccaggaagcagagagatggatgctggtggtacacggtctacttttctccttaagcacaggacccctcaagcccatggggtggtgtcatgtttagggtgggccttcactcctccgttaatgctcttgaaattccctatagaagcacaccaagatgtatgtttcttaggtgatttcaaatccatttgagttgataatgagggttaactatcacaaatctacccattctcaactcctaagccttactacctttaaatatcaatattttactcctgttcctccacatttgatagcaatctcaaggtagataacacatttagttcattgtaagagtagtcaaattcttagcagttctaacattgttcaaaaatcttaagttcaaggcctggtgaggtgtggtgtataccattaataatagcacctgggaggtagaggcaggtagatctaagtagttctaggccagccaaagttgcatagtgagacttaattgtgagtctctgtaaaattaacaaacaagttacattatctaatatacaagggcactgagcaaacattcccattccagaagagaggagtgaagatattagcaaagagattagatgaaagcaagactgaaacctatcagggaatctagttcatgcccaacacctgggctttttatggcatcacctgtgttccaacaagcttgggtagttgtgctctcatcagctctgatgctttgagcatatgtagcctctgtcttgagtcagcttcactaagttcctaaaacagaggctctcaacctgggcactgaaccctttcataggatcacattggaaaacacagatatttacatgatgattcattagagtagcaaaactacacttaagaaataacactgaaaatagttttttctttccattttttattaggtatttagctcatttacatttccaatgctataccaaaaagtccccccatacccacccacccccactcccctacccacccactccccctttttggccctggcgttcccctgtactggggcatataaagtttgcgtgtccaatgggcctctttccagtgatggttatggttggggtcaccacaacgtgaggagctgtattaaagggtcgtagcattaggaagattaagaaccgctgccctaaagcttttcttgacagatctttctggcatctctggtacccttgaggtcacctttgcaaaaagcattacctttatagcttcataaaatggtctcttagggtcttagtgcaggcaatctggccctgctaccttggtgcaagactgtgtgatcaccttgttgaattctggatgtctgaaaacgcacatgatgtggatgatgtcaagttatgctaccagctcaagatggaacctagttgtattagagcacaggcgctgtggcctttctctgccttctagagcatttcctgcagtttactctagagtctctgctttttaggcattatgttcttcatgtttccggttttatagcctggagcctttactgggtaggtaggctcttatccccaaggcagtatatataccatatagagtttagggtttttcttaattgcacagatttcattatacttctagacactttgtccaaaccaaactttttaaggcagtcaagctcctttcctcaccaaactgcacatttctagccctttatttatttatttatttatttatttatttattgagttaggggctcatgtaggtcattgtggcctcaaatttggtaatgtaactcaggctgactttcctttcctcttgtctctacctgccaaatgttacgactataaacataagcacaatatccagttaaaccttgtttatgcttttttttcctccccaaactgtacattttccacatctagtatggtttgcatgtcctcagtggattaatgcagtgagtagtaaccacaagtagaacgaaagcctagaggttatgctgactaacaatttgacaagcaatttagtccattacttttgcatttagccttgctcaaatgatcaggtgggcataatgattgccagaattaaaaaaaaaaaaatggccagcccgggccgtgatggcgcatgcctttaatcccagcacttgggaggcagagagaggcaggaggatttctgagttcgaggccagcctggtctacaaagtgagttccaggacagccagggctatacagagaaaccctgtcttgaaaaaaaaaaaaaaagaggaagaaaaacaaaaacaaatggcctctagtcctttgacatatctgagatctctttaaccaggacttaattgttcgcatttctgtattctgttagtcatcattcctactagaaatagactgttaagctctactttggcactctaggtcttctgtagcccacagaactaaaccttttaagattcttcctgcaaccacctctaaatgcctacaaattgtatggtcatgtatacacagcagtgaccccacttctgggtactaactttatctcttttctcttgttgctgtaacagaatacctgacaaaagcaacttaagagatttatttgaggggtacagccccatcacagtgggcaaggcatggcagtgggaacgtaagatagcctttcatgttgcatcagggaagaagtgaagaatactgatgctcaacttcctctttccttttcccgttttttattcagcccgagaccccagcctatacgatggtgtcatgtacattcaggtaatgagttagacttacctggcaactccctgaagaaattcccatctagagttgtcttttaagtgattccaagtctagtcaagttaaaaataaacttgctgggcatggtggcgcacgcctttaatcccagcacttgggaggcagaggcaggctgatctctgacttcgaggccagcctggtctacagagtgagttccaggacagccagggctacacagagaaaccctgtctcgtaacacacccgcccccaaaaattaacatccacacctgagattgtgcctagactccagtgttccagtcacttctgcaaaacccttttaaaaacacatacaggttttaggcattaggtctgatattttcaggtggacattattcagtctaatccagatcgggagggaatgggaactcattaagagatgtcctgctgctgggttaggtatatgcactggtcttaccatgttttccaccagccggaagtagttggcttgatagcactttggaaagatgtagttacaaactgataaggtactcctttaatcccagcactctcggcaggcagatctctagtagtttgaggccagcctggtctatatagtgagttcaaagacagccagggctacatagaccttgtctcatctcctccccttcactctactggacaaagtactgcctagtatcccacgtactaggaagtgtatattcccatttcacagattggaacactatggctcaaagcagttcatcacttggcttttatttggtagaactgcattgaaacctaaatcagtggttccatagcctattctaacttctcttaggcttttaggtgtttttgtttgtttgtttgtttttggtttttcaagatagggtttctctgtatagccctggctgtcctggaactcactctgtagaccaggctggcctcgaactcagaaattcaagttttgcctctgcctccggagtgttgggattaaaggcgtgcaccaccaccgcctggtggcttttacgttgttaaaccagcttttaaacagggtcctgtcttaactcctgggatactatggtatcagagagctttgtctagtccttttgctaaggcttagagatggggagagagactctgctccaggattggtcttgaacatgtaaagttcaggattgagacttgatcttctcgggtcaggacaccaatacagaatacatctacagattgttggactgttctccagccttctagcacttcctaaacatcttcttcccaaagtgagagaggaagaaagctagagctctaggttttcaaactgtgatacgaaggccagtggatgcttagtgatacatcctctagatgcaggcctagatgccatagttatcgtaggacccacactctatttgtgcaaaaggtctgtctagtcagacttcctttatttttaggcacatcagaactcctccaggacttgctaccaggcatgtgtcaccgctcatggtacatcatgtgctgtgtctctactactaggctttgctactaccctgactgcagctcctttctgcctttgtaaagtgtgggtaatgctgcttcctgccacttgggttgcagtgaggacaatgaaatgaggtcacttttgtatctggcacctggcataggacaaagcactcagctaatatgagttcatcctttctggcttttccctgcttagctgcctagttttgcttgcgtctttgctctcctatacacattgccaggctttgagcatctctggtgcttggtgacagaaatgactttatttcttatccacttatcaagcaagttttgatcctttgctcaagtgccagctttaatgtcagggtaaggtctcttcctgcttcacaaaagcaagggagcattcatttgttttgcagccccactcaaactgtacgtcatcactgcgtatttctgtacccttcccttcaaagtttaccagggtagagacggaagtctgattcatttttctgtcttcattgtccatcccagaatgactcctattttgtgagatgagaactaggccccctctttttctctttgtatcccttctatcttcctcatctaccttggagaatgctgttctcccccctttaactctccctattttaaggtatggggctatggttaaaagtttcttttctgaggcagaggcaggcggatttctgagttggaggccagcctggtctacaaagtaagttccaggacagccagggctatacagagaaaccctgtctcggaaaaccaaaaaaaaaaaaaaaaaaaaaagtttcttttctgggcaccccttgacaggctaggccttgtgagtcttggagatggctaaaaatgtgggcaaacgatgaacttctatgacagtgcacagcctccagggcaggatgagcacccgtgctgctggaaggttgtgcacagatgggtttgtgctacccagggaagcacattaaaggcttacaggtatatttgtcatctctgcaaatgacgcgacaccttcctgatgtagtggccccagagggtggggctggctaggttttcctttgtctatgttcatcctctttctagacactcacctaggacttcttgagtggacatcatctctttttttgggggggggagctggcctcatctctgccccccaccagtgctggaattaaaagcatgccctaccatgccaggtttgtatctctctctctctctctctctctctctctctctctctcacacacacacacacacacacacacaaagatttatttattcatttaatgtatatgagtacactgttgctgtcttcagacacaccagcagagagcatcagatcccattacagatggttgtgagccaccatgttgttgctgggagttgaactcgggacctctggaagagcagtcagcagtctcaaccactgagccatctctccagcccttgtacatcgctttttgttggtcttttcctcttttatgtttagtgaccacctcaccagtataggctattacagagccaacctcctgctctcttggcagatgtgttgagaagaccaaatgcttctcagtttgtaactggtatgagtttaggcagcttccctacaaccagaaaacactgcagtgatggagctggctgggtttagacctccggacactatgcctactctggtttttctacccatttcctgtagtggggtacaaaaatggccctttgtgatcaactttagcagggagcctataagttcctaggaacagggcttcctattttgtagtgcagctgtgttgctaggtcaagctgtctgcttctggcagccagcagatggcgtgagaggcctgagaaagatctgcttctgcctccttttgaaatggaaatgttttaagttgtcaaggtcattattattattattttaatctagaagtatgagtttgtatatgttgattaaccaaacactttggaatcaaatgtgatttgaattttaggaactactcagaatttcaatttcctggtgtttatactttatattatataatactttaacaggctgaagaagcacctcatgatcaagtgcctaaatgtttctgtgggaaaatgtttgagccttcaccctcaagtagggtatttggtatattctgtttaggttatgatgggacatgaattagatgaagactttgagttttctgtatttctttctttctttctttttttctttattctttttttttggggggggttgtttgtttgttttttgagacagggtttctctttatagccctggctgtcctggaactcactttgtaaaccaggctggcctcgaactcagaaatcctcctgcctctgcctcccaagtgctgggattaaaggcgtgcgccaccacgtcgggctttgtattttttcaggtcttttgatgttcaaagcatttagagatttggaatttcagataattgtatatctttatcttctgtatgtgagtataccattgctgtcttcagacgcatcagaagagggcatctgatcccattacagatggttgtgagccaccatgaggttgctgggaattgaactcaggacctctggaagagcagtcagggcttttgactgctgagccatctctgtagcccctagggattatatatatatttgtttgttttttgagacagggtttatctgtatagctgtagctgtcctggaactcactctgtagaccaggctagcctcgaactcagaaatccacctgcctctgcctctcaagtgctgggattaaaggtgtgtgccaccattgcccggctagggattatattttattgtctacttttttttcaattttgtgatatatatatatatatatatatatatatcatacatatacacacatatatacatatacacatacatatttatgtttatatttatttatttaatttatatatgtgagtacattgttgaactcaggacctttggaagaacagtcagtgctctgaagcactgaaccatctctccagcccgggaaactttttactagaacaccacattctccatctaggaacttatgaggtctaggtccctggctgcctgggccaggtcttgcaagattgagagcagggctctgaaagtagatgaagtttctgttttcagggaatctggggcctccctgggattgtcttgtccttgtccatagacttaagtctcctgctttgtagtcacagagtagtcaagaagggctgtgaactttccagtatccttttggccaatcacctggtcttctcaggaacttgaaggcagcacctggagaagggtatgggcttccctgttgctgatcttcctactttttcctccagcaggaacactggtttgaaaaggccttgcgggacaagaaaggcttcatcatcaagcagatgaaggaggacggtgcctgtctatttcgggctgtaggtgagtctctatcttggttttgagggctgaggggcttaaggcttctgagctgtgtcctagtagtcagtagcagtccttgagacaggattgtggcagaggtaactgcttgatattttaggataaacaggcgcggagctcttgttaacgtttggcctctggtgttggattgtgttaaatgagtaatgataacagcaattgtagtgataaagggacaccactgttgacatactgctctgccaagattccaggaaacccacttattctgtcagttaggtaggtggtcggttggttggttagttttcaagtcagtgttttctctgtgtagccctccctgtcctggaatttgctctgtagaccaggctggcctggaactctgagatctgcctgcctgtgccttctgagtgctgggattaaaggtgtgcaccaccacctggtgtggaaacccttttattaaccccaagtccaggtgaacgtgagactgaaaaatgtctcagaagtggggagtgactagtctaaggttatacaaaagtatgtagagtcaggattttgtgtgtggattaactgtatcatattgtcactttggtgtttctctggtatcgtatattgcggatggtgcatatttagtgcctgtgtttatgcttgtgtatataataaaattgggcatggtgaagcagtttttctcccagcattcaggaggcaaaagcagggtggatctctttgagttcaaggacagtctggtctacattgcaagttctatgacagccaaagcttatatttgtcttgtctaaaaaagaaaaatctagatctttacaaatttctatattagagttttttgtcttttaacttgcacaaaagtagagaaaacagtgaaccctttcagatttagtgacgtagcttcacaaagtgattaacacatggatagccttactttatgaactatatcgtattatcatttcattcataaatatttctctatgcttctttttaaagatttatttatttattttatgtatatgagtacactgtagctgtacagatggttgtgagccttcatgtggttgttgggaattgaatttaggacctctgcttgctctggtcaacccccgtcactcaggttgaccctgctcagtcctactagctctggcccaaagatttatttatcattataaaaaagtacactgtagctgtcttcagatgcaccagaagagggtgtcaggtctcattatgggtggttgtgagccaccatgtggttgctgggatttgaactcagaaagagcagtcagtgctcttacccactgaaccatcttgccagccccttctctgtttctttcttttttctttttcttttatttttttccgagacagggtttctctgtatagccctggctgtcctggaactcactttgtagaccaggctggccttgaactcagaaatctgcctgcctctgcctcccaagtgctaggattaaagacgtgcgccaccactgcccggccttctctgtgcttctttaacagatacatctatattgttttctcttgttttcatataagtaaagtcctgttgtcatacctaaaaaattttttttctttcctgagacagagtcttgttctctagcccaggctagcttggaacttggaataatccttcttcagcctcttttttttttttttttaaagatttgtttctttattatatgtaagtacacagtagctgtcttcagacacaccagaagagggagtcagatcttgttacggatggttgtgagccaccatgtggttgctgggatttgaactcaggacctttggaagaacagtcggtgctcttaacctctgagccatctcaccagcccctttttcagcctcttaagagctgaaattatagatgtaagtcggtatgtacaactaagaattggtaaattttttttgagactctggtcgtcctggctgttctggaactttctgtgtaaactaggttggccttaaattctcagaggtcacctgccttagcctctcaattgctggggttaaagtcatatgctactgtgccagcttagaattagtaatttcttgatattgtctgttaagcctgagctagatctttgaccaaacaaggagttttgaaatcccatactgacatgaagggatcctagattgtggcctgttctctcctcccacaccagtggttctgctatcttcgaaggaaaattgttccctgacatttttgaactgggaatcagaagatgtggctcttaggctggctgtctccccatcggtgaaatgggtgctccctgggctccatcagttctttctaggtctgctcttggtttctcggtgatccgcatgtttgttataagctgtttggtccttagcaagtgtctcttctttcttaatcctctttcattagttgaagagtgggttaaaggactcccctgtggtgatggttttgatatggtttgatttactttggtaaatctctttaatgcatacttggtcattatggaacagtagcactagtaaagtctggctactcttctcagttgtttcccagactcagagctagaaatatttgtggaatgggtgggacaaaggaccacaagcagaagctattcaggtaatgatttctgttgctttggagaaaaatcccaacccttctagccatctggctcagttatgttctccctgggaaatttactagagaaagacctgagtttggaaatatcttagggataaaaggaaagcagagaatgaacaggtgaggatctattagtttctgggttccatattaacctcgggatggatgttagaagaagcaagattgcttttggacatctgggctcagatgttctctgaggcagcttggagcccttgagcacctggtgtgaatagttatccacatcaagagcaggtttgtatgcgtatgtctgtttagttaccccccccccccccatcagggccttccagtaaggggcccaagcatacaggaagagctgaccacagcagctttaaggcctttccttatcagcactatggctacacatttcccctgactgggctgccctcagcttttctctgtaaaacctcaagtcctatgggctctcccctgaagtacgtggcccctggtctctaggcctcctctagaggtttccctggtgcagagtacacaacatgtgctggacaaggggactttgtccccaggctttccgctgtccccctgtttctagcctagcttatacagggacagatggccatcacctcactctttctacaaaggcctgcaagcattaactttttaccatgtattgactaatggagggaacatgtaactgagagctggaattgagtgagttgcacacatacattacactttgctgtttctctaaccctgcttgctgtgtgctacacatccagctgggcgctttaggccttcctgagacttttggatcattatgccatgaaatagaagctctgaaaagaagggcagaaagtatagctcagtactagctcttgtctagcatttgggggaccctggatttgatgctcagcattgccaaggattgaaggagaagtgacaatggtagagtttgcacagaggatgaccctaggagcccctagctccgtggtttttaacctgtggcttgcaaccccctttggggtcatataaccatttttgcctaagaccattggaaaaacgatatttacaagtagtaaatgcaaaattacagttgtgtagtagcacacgtagtttgtttgtttgtttgtttttttggtttttcgggacagggtttctctgtgtagtcctggctgtcctggaactcactctgtagaccaggctggcctcaaactcagaaatccgcctgcctctgcctcccaagtgctgggattaaaggcgtgcaccactactgctcggctctttgtccattctttgacctctctagattttccttctacctagaagcatttattcttccattgttgagggtccagtgcaggtggttttctgtcctttgttttgcctctgacatccagagagcacttttgaatcagtatcaattgcttgtacccatttctccctagtacctcctcctagagatttatgagcatcagtgatctaccaggtggaggcaggtatcctgtgacccacccagtccctgctgtgctctgataaccttctagaaacatgagcctccctccctccctttccctccatttgactttgactaggcagaagtgtctagctctggccatggcaatggtgctggtctctggaccaagtagaagccacatagttgtgtctgcatggacttcagaagagagtagcgtagctagggctctgttatagcccagaagtattatccaggcccacttctggttgagatagggtctcactctaggaactttttaggttagaccaggtgcccttgtaccttgagcttgtgatagtcgtcatatcttgaccttctgtgtattggggttacagacatattgctaccatgctttcttgtttgacagattttctttgtgacagggtttctttagaactctctgtagaatgtggaccgtagaacttaatctgtagatgaggctagaatctgtagatgaggctagaatctgtagatgaggctagcctccaactcagagatattcctgcctctgcctcccgaatgctgggattagaggtgtgcatcactggccagccttagatttgcgagctttataaaatgagaaactgagaccttaagagaaagccaggaccttgtcttgtctaagtccaccagccaatgtaagaacaacagtgtttgaaattgtattaagacatagtggattcctatgttttatttcttgtacacctgccacctttgatatctctttgctcagaatcatttgtgttttcccatttttgccaggggaatcctcaaacagaaaaacttatatctcagattggtaggagggtggggcaggggatctcccagaggtctgaggtgatatatcttgcccatagtctgtacccagtgggacagttgggtgtgtataccctgtcataccatggctacttgataggtgggtagaaccttttcctggatgctgcttcctcaatgaggccagggtttccacgagagcatgagttcagtggagagcagactaggttgctgttgcccttgtagctctgtccatctaacccacatttgtgtggtttgggtttaggttctccacgaaagccaaacttcctttctttattaaacatgtatgtgcgtgcatgcataccatagtatgtgtatatggaggtcagagaaaaactcaaagagtctgttctctccttcctccttccaccctgtaggttctagggatggaactctggttgtcagtctcggcagcaggtgcctttacctcttgagccatctgcatagcccgaagtttgcctttctgtctttagcagaacttaatggtaggtagcaacctgaggagtagatggttctcaggtccctccaaagcaagagaagacttttcatttatagcactttagaaataatgtgggcttgagccggtaaagggaaataaatggttcagccagtaaaggtgcttgttgctgagcctggcaacctgagttcaatccttaggactcaagtgatgagaggaaaaaacagactctttcttacaggttctcttctgacctatacatgtgctgggacatacagatgcacaaaatagataaatgtaataataaaatggtagaaaagaaaagtggagctggagagagctcagtagttaagagtacttgctgctcttccttccagaggactctaagttgggttcccaggactcacagtggcgcacaactttccttaatgctagttccagagggtccactgccctctcctgtttgtgggcatcaggtatgcgcgcagcacacatgtacatgtgacaaaactagtatacatacagcaaaataatctttgtaggggggaaggaggaaaagtaatctctatcttacttcttgtaagtgtggacaaatgcaggttacattttagggagcctgaagaaggaggacttccccatacagcagaggagaaagatgaaacaaatttgctagaagtgttggtcattcctctcccttacaaaggctgggaaggaagtagtataagttcctaggtatgcacagcttcttgtctagtgttaagcctttcttgattggtgacaaaggcatgtactcactgtatgctgtggttctgtgttgtggaatgggtcatgtgggtatttagtctgtttcagtcttttgtagaccctgctgactgcatgtgggcacatatgtgcacttccttgtatctttgtatgttcacagaaagcaaagtagcgtggtccatggggaggaaggttgatgttgaatctagggaagtgtgcagccagatacttgttaattctatattcagtcccaggcctttttttgtttgtttttttttttttgtttttccgagacagggtttctctgtgtagccctgactgtcctggaactcactgtgtagaccaggctggcctcaaactcagaaatctgcctgcccctgcctcccaagtgctgggattaaaggcgtgcaccaccaccgcccggcctgtcccaagccttttccttgttccaaccaatttcttgtggattagcaaggaaactgaagtacagaggatcaggcccagccctaagagaaggctgtgagggatggggtagggaatgtcacttggggccacctattgactcctttcttcctttagagctaaatacgtgctaagtatgtgatcctgagccagccgtgatacttctgtatcaatgccacccccatccctagcacagataactttgtcctttttgattttgagtgaagatcaaatgagttgttttaaaagtctgtagtaaaactaatgatagtaatgtgctgagaatttgtgagccctacttagaaagagaacagaggtggactatagctgggggaatcccctcccagctggaccctggaaaaaagcaggtgcatatgggcaagtgcagtgttagcaagaggaggagtttcagtttctttcaaaacattttctctgaattccccctgtatttgtgggtccagtgggccactctttctcccaccttgtacccctccccaggaagtgcatcctggcccccacatgctaacctgggagggctaggaaaattagaaaacctagttgatattaagtaatgatatgcttggggctggtgagatggctcagcagttaagagcactgactgctcttccaaaggtcctgagttcaaataccagcaaccacatggtgactcacaaccatccgtaacgaaatctgacgnnnnnnnnnnnnnnnnnnnnnnnnnnnnnnnnnnnnnnnnnnnnnnnnnnnnnnnnnnnnnnnnnnnnnnnnnnnnnnnnnnnnnnnnnnnnnnnnnnnnnnnnnnnnnnnnnnnnnnnnnnnnnnnnnnnnnnnnnnnnnnnnnnnnnnnnnnnnnnnnnnnnnnnatctgacgccctcttctggagtgtctgaagacagctacagtgtacttacatataatagatagataaataaatatatatatatttttaaaagttataatatgctttacctattaaagggttttttttcctctcttggtggggaagtactgtttgtatttccttgatctagagatcatcatcatcatcatcattattattattattattattattattattgatttctctgtgagccctagatgtcttggaactcactctatagaccaccctggccctgaactcacagagatcacttttgccacccaagtgctgggattaaaggtgtataccaccaccaactggctgcgatccgtattttacttcgtgttaatgattaagctataagctgggtatggcacacctgtaaccccacacttgagagaggaaaggaggaggattgttgtgaggttgatgccagcttgggctacagatcgagttctattccagccaagtgtctcaaactaagaaaataaaagtaaaaaattaaggaacagcttataatgagtcaataggtggtcccaagtgacatttccccatccaaggtgttttctaatagaatctgggatgagcctataagtattataacttgcctgtacccgaggacccaacataaaaagtcagtattattactttgataggaatttggttgttagagttttgaacaaaggcgcaaaaggtcggcgtttggaccattgcattcttcaaaaagaactagtagggcagggcatggtggcactcgcctttaatcccagcactcgggaggcagaggcaggtggatttctgagttcgaggccagcctggtctacagagtgagttccaggacagccagggctacgcagagaaaccctgtctcgaaaaaaacaaaaacaaacaaacaaaaaagaactagtagtgcttgtaataggaggggtagacctcctttttgcttttggggcttttctctgggggaggaagtgcaacagaaatgaggaagggcttaagaagcaattctctcagcactctagctgactgctgggtcgctagcagtatgataggagttgctgtcctcatgacaaatggggtgtctggttttgtttgttttgttgttttgagacagggtctctatatagctctagctgttcctgtactggaactctatgtagactaggctagccttgaactcacagaaagcctctgccttctgagtgcagggaatatgtgccagcattcctggcctggagtgcctggttttgactactgtttaggctttaggtacttgacagatgtcttgtagtcccatccccatactgaagattgaacctagcatgccatattctcccatagaaatatatttctatctctcctctctagtctttaccattttaagtggagaagagttactgtccccacttatggatgagggcatttcaactcagatgaaaggccttgtccagtgccgcacagctaagaggtggcatggactttcaccagaccccaaggcaagataaaggattcccaaatctggcatctagctctgacaaatagaaatcccaggcctctaagttaccttctgtaggagatccatgtttcccattaatttggcccagctcactgagcctgatagcccaccccatttaaccctttcattcccatcttagttcctgtttatggcagctgcagactgcactgcctccaaactgagcctacaaaaatagctcctctagcaccctaggcagccacagcagcctctgtggtcctggcttctaagaaaggcagcagcagccccccaccccacccccagcttgtatgcaggacatgtgatttactggaagtacttaggggggagtgtggccacagaagccacatccttgtttacatcggtgaaggggctaccccttcctgccttcacagccccttctccacccctcaggtatcgtcacctctgggatgacttgaggctggagctacccactttctctctcagtgcagcctttgattcctgtattatacagaaccctcatggagggaatcactgggcagtgaagacccctggcaagtcttcagagaaatagactggcaggcttgcttggtgggcacgttcccattcctagcattccctgcccctgtgccctagggggatcccattagaactgtgtatctctggggaaacacagggaaattcccttttcaaggcagccagtgaaagtcaggtttgcttaatcttcaagcccacattaattaagaaactcttgcttcctgtgcctcagcatatatgactgctcagcaaactgtactcaatttcttttactatatcaggtcctgagctgccggtgggcttaggtgtgagctgccccttatcttcagtggaggctttgtgtaatcagtctgtgtacacctttgagttggatggtagaggagttctaccactttacacagactgtccacattgtccacaagaaacctgtcaggtcacacctgtttgttttccacttcacagaggaggcataggaaactcagagagtcatttgtctctggctgtttacctcactagttactatttggcagaacttaaagtgttttccttcccttcagtttttaaaattctaatcatagccatgtgtgttgacgcacctctttaatcccagcactaggaggcagagactggtaggtagatctctggagttcaatgtcagcctggtctacagaatgagcttcaggatagccagggctactctgggaaagaaagagtgggggccaggaaggagagaggaaaggaaaggaaagaaaagattctaatcatggtggtagcctttaatcccatcactaagaaggcagaggctggcagaactctgtgagcttgaggccatcctagtctatgtatcaagtagcagagcagtcagagctatagactgagaccctatctcaaaaaaaaaaaagattctaatcttttttgtggtggtggtaggtattgaatgtagcgtttggtttggcttgaaatggagttttactagatctcaggtgatctaggctttgaacttggcaattctcttgactcagccttgattataggtatatactgctctcctttgtttcccccactgagacagggtttctgtgtttatcgctggctgtcctggagctcactctgtagaccaggctggcctcgagtcctgggattaaaggcatacaccactgtgcccaacttaaaaactttttgttatttcatttttattagtgggtatggagattgggatggtcactacatgtagaggtcagaggacaagttaagggagcaatttggttctctccttcaactgtatgagtcttgaggattgtactctagtgcctttatccactgagcatcttgctggcccttgactgtactactctcacctgtctaccctatacgctttcattcttcaagagtgtttgactttgctacttttttttttttttagacaggtagcctagcctggccttgacataatcttctggccattccacttgcacatcctgagggctgggatggtagacatgtaccaggccacctggctgatctgtgcatgttcagcatgttttcagcccttgcttgttatttccaccactcctttacaacacaaatgaaggctcaggccttggtgtagaaaagggagtttccctagtccttcagtctgtcttctccctaatgattgttgtatgactctgtgactcagagctctggtggtgacagctctgaccccatcctctcctttgttttgtcctcacacccccagctgaccaggtgtatggagaccaggacatgcatgaggttgttcgaaagcattgcatggactatctggtgagatccaagggaggccttggggcagcaggagggtagggggacccccgttgcacacaaaccttaattttccaatctattccacagatgaagaacgctgattacttctccaactatgtcacagaagacttcaccacctatatcaaccggaagcggaaaaacaactgccatggcaaccacattgaaatgcaggctatggcagagatgtacaaccgtcctgtggaggtgtatcaatatagcacaggtacttctgtagtgggtaggtgagggactaatggttcctcatcagagccaaccataccgggcccccctgtggatgctccctccttctctttctctgcagaacctatcaacacattccatgggatccatcaaaatgaagatgaacccatccgtgtcagctaccaccggaatatccactataattcagtggtgaatcctaacaaggccactattggtgtggggctgggcctaccgtcatttaagccaggggtaagtgggtccctgtgccccaggtagatatggatcattgactctgcccttagaccataaaactgtctccccctaagtttcacctgtctataaaattagtgagtcaccattgatcagaactcattctgtagcttttgatttgcctgtccatgaagtggctcactaatgttattctggttgagccttttaggatgtagagctcaatttgaagcagtaaggcagaccttggactaggtatccaagcttccacacaggtagatcttctccaacttcagagcacttacagttggagtcacagacttggaatgtagcagcttactggaatgggccctgtggacagattgtattgtttgggcctatactgaaagtccttcccacaggcccaagacctaattggtgtcagaagatgggagttgatttgcccagcatccactggcagataatcatttccgtctcacagtctctctcctcatcttccctgctccatcctccccctttcatcatgtcctctgatcctccctcttgccttcctcctaggctctttccccttctcctcaccccacttcctctcctccccaccccctctcctccctggtctctatcttcccttcaccccctcctgggggttttgaagtcttctattcaggtttcacttcctacaaaccgaaggtggtcctgcctaatcttaaacaacatcaacataccctccaaccttggtgggggggtggggttattttttaactaaattttagaaaagttacagatttgcaaaatgattgggagaatattagcatttccatatgccccactatgattaacatgaacatagtacatttgttgtcattaacaaatcagtatggattcattaagaacaatttcctcagtttctacttggtgagccttttccaggattctgtctcacatttaattgttccctttgacttcttgtgactttaacaaattctaaagaatttgactgcttttgttttgatctggtgacccactccaccggtttagaatgtcatctaatgggaatttcgctgcgtgtatgtagctattccagaatgaattttttctacttaattaatatcatttaagattcatctgtaacttttactttatttccttttcctttaaacgtctgaatgtttaaatgtttctctaattaatagacttcattgttcaaaactattttacatttgttttggggaggggtttgtggaggtctctctgttcatcaagcttggtgcaaagcccccttcctccttgagaacagtgttctcagtgtacagtttccatctagtctcttcccaaggaacagagacttgggtaatctgttaccatgtgtgaaccagtattaatacatgcctactagcctgacgttactgcctcattcctcccacttgttttgatgatctcaaaaattttaaggagaaccattcaaaagtattgcagggaaattatttttttttccagcatttttctaatgattttaactttgatattgggttcgggcagaagagcacagatatcaagaatatgtgttaggaatatgatcatgactgttgatgttgtctggcagaagtcataggaattttcccaccttttgactgctgtagtgttaggaaggaagtcatacttaaggaaagggaattatgtctgtcttcctgaattgatgttaatgtgagcttagggttagtgctgctatatctagttaaaatcccttgaccatttgcctccttctagcctttttcttgagtaaatttcccttttcctgagtaaattttcactttaaagtttagaaaactttccccatcacccagcagtcatttacatgactgctatttacatatacgggtataagctggggcagactcattaactggaccccctggagtccggtgatatctgcagttctttttatgtttagtgttactgattctattcatttttaaagtgcccaaggccaccacctgcttgtctttgcatacatttgtaattcatttaggtggttttgtcactgggagccttacttcttaactaatctttaaaaggcgattagcatacattaaggattagtctttgttttgtaaagttccttgggttttgacagatgcataataataccatgcatctatcttaggcacctattcattcagctagtttcagcccctaaaggttccccacgctttctcctgcaaccactgatctttattgactgcttttgcctatttcagaaagtcacgtaattgcaatcataagtatgtaagcttttaaaaatgctgctttcaggtagcaatatgcattaaggttcttccctggtttttcatggtttgttagctattctcttatcactgttccatttgtggaggcacactgttggtttaatcattcacctatttgaaagatatccttgcttgcttccaggttttgatgattatgaacaaagcttctgtaaactgctgtgttcaggtttttgtaggaacttaaattttatgattagttgtattaatatctggaagcaagattgcagaattataaaatcatgctgtgatttgtaagcaactgctagactattgtatgaagtggcctgatttgttccagtcgccatcacaatgaatgaaagttccattcctcttctttcccagcaattcatctttctactttttttgaattttagccattctcagtgttttttttaaaggctccttgattgttaaatgtgttgaacattgttttaatgctctaccactgagcttggtccccagcctgagtattggttacatatgtccattggccatctctatatcttttacctgtgcgattagatcacttacctacttttcatttttgtcattttgtagtgctaggaattaaacccatgtttttgtgtatgcattcattatcactgagctggccctatttttaaattggcttgatctaacctttttatacatgtatttcccctggtgtgctccatgatagaaaattatgttgtttagcatacatgcatttatgtatgttatgtatgtgcatttgaaaatgatgttgctagggacatggtggtacatgcctgaaattctagtagtcttgaggcagaggaagagaattgtgagttcaaaaacctaatgactgggctgcataccaagtcattgtttttggaaaacaaaacattaaccaaaattttaggaagtagtatttgcatttaatccctgaaatatactttgatgttctctattatttcattagcatcatgcctgtaatcccagcacttgtgagcctcaagctggaaggcaaattgccatgaattccaggccagcctggccttcttagtgagttcaagatcagtccaggcaatggccctctctcagaaagcaactaatgttgtagtgtcttaaaacttgatgcgaacttgcatgagaatacagtgtcctagcacccacacgatgccaatactgaccctttaattcctcacatagccatacccagcctcatatacgcttgattcctgcctccactccatgtctgtacttctctgttcatctttttcctttgccttatctgggaatatatgagaaaggcttcagcattgtgaaattgaatcattgctagatgaggcttctttaaatgaaggcctagacagaagagcccctcttatctccagacttaatgcttcacttgaggtgtcttgggtttgggcccatatatctgaccatagcagttcagattgccaggtcttatatctaagcctgctttcttcagttatggatggttctatacacaatccgctgaggagtgctttgtaaaaataacttctatgttgtctttgctaaggcctgtaggcctgcctttctgagcccattcaggctcttacccacgttcagagcatcaccgcacatccctgttcctctccccccctggcagtttgcagagcagtccctgatgaagaatgccataaagacatcagaagagtcatggattgaacagcaaatgctggaagacaagaaacgagctacagactgggaggccacaaatgaggccatagaggagcaggtggctcgagaatcttaccttcagtggctgagggatcaagagaaacaggcccgccaggtccggggacccagccaggtgggtcatggactctgtcattggcctgaccaagacctgttacttcttatcttttgacccctaattgacagggataaaataagagattttgacatctgggagaaagggaagctcccagccccatctctaactcatctcatctttagtcttggcatcgtaccttggaactctcaacacttgattttaagaagtgaaggagagccagctcttaagaaacgaagagagcagctaccactgctggtagcacaaaggaacaatggatagctacaaagagagcagctttttttggaatccctttgcatgctgcattctgtcctgaggatatagtctttccttcactatcttcagtgatcctgtctgtctgttgaggcagatacggcattggtcaggcctgtgactctggttgtacaagaccaggagaggtggaggatccagtcggttgtatttctaggatagcaagcagggaggcaggcgcctggggaatcacagagggctttagaatgactaaatggttccagaagctgaataatctgatcagcgagtatttactatacgcctgtgacaggaagcaggaggtcctattcctagtgtagcgggctacattgtgaacctagcaggccaaagtacctatccttaggctactcacagttttactaagtgaaataaaatgctcataatgaataaattagttggaggtatggtggatgaaaaatggacacttggtacaggggacaattgagactgagtggagatggtctgagttcacggtattaaacagtcgtcggggtaggcctcagcagatgaggtgggggcagcctataaaaaggggatttggtagctgggggtgagggcagtggagttggtataactcagagtctgtagctgaacagaacgagggtgagatcagggtagtggggctaggttggatggtgacttgtgaattctggagaggactttgattttgctctcaatgagacagaaaccatggggggtgggctgtaaacacaaaaaggattcgagttaggacttgacaggatcaccctgaccgattatagagcaaatctgagggagaaagcagggttgaagtatgagatcagtgaggaggaggctcccaagggagtcccagtgacaggtgagggtactacaggcgtgctatggaatcacaatctcttaaaagaataggactttgtcagatgcctgcaaggatatgaggctagttaagaatctcccagtagtccaccgtgatacattaaagctgtgctatagccaggattctggaaagggtataatcactctggcacaggagggtcatagctggtgtaggtccttatcactttttccttccctactgcagccccggaaagccagtgccacatgcagttcagccacagcagcagcctccagtggcctggaggaatggactagtcggtccccacggcaacgaagttcagcctcgtcacctgagcaccctgaactgcatgccgagctaggcattaagcccccttccccaggcactgtgttagctcttgccaaacctccttcaccctgtgcaccaggtcagtggcttgctttcagggtgcctgcttgggctaagaggctctgcttgctgggccctacctctgattgtccatctgcctcaggtacaagcagtcagttctcagcagggggtgatcgggccacctctcctcttgtgtccctctaccctgctctggagtgccgggccctcatccagcagatgtccccctctgcctttggtaagcctccttaggggatgggccagctggaagttgggagagcccggaggattttttgaagcccctggccatctctcccaaatcagaggcatgagggaaaatttcaggccccaaagattttctccacagtgggtctagtggggcttcacagagttgagggagtcaatgagtgattgggacctgaacggacttttccagagccagggatcagacagaaatcagggaaagtgacctgaggccccccatcatcgttgtcctcttctctctcctgcccagcaggtctgaatgattgggacgatgatgagatcctagcatcggtgctggcagtgtcccaacagggaatacctagacagtatgaagaaaaacaaagtgcacagagagccaccccccagacaagagttgatggacaccccagggactggacatcattcccgatcccccactcctgccctttgatgccacccaaacttctttggctttcttccctcttggcttccttcttttgtttcctcttttccttttttttttccacttccctctggccggcccacccatgcgctccatccatctcatccctgccaccaccattggtctctgccagctgaagtgccctattgcccccgcacagcaccatctcagcattccacaggggactctggaaagggtgcggaaggtaggcaagaggcccacagagacagaccatctggcagccaggcagccccagaagagagacattcagacaaaggaagtcttctgctcacccttccttaaagatcagataaacttgtcatcccttcccagcaatgatgacaggaaaatggaagtggcaagttttccttctagtatccgaagaatctgagccttcaatgttaaaatttttcttaattaaaatgtgctttatttcacaaaatcaacaaatcaaaaagaatattcatggcaacgttggtcctttgagggtggcatctctggtttggagctaggcaggctggccatgggacagaaagggcagaaaaaagatggatttctgctgtcttttggcccctagttccttggaagggcaaaggctatgaggtagagggaggtgacaggcattgcaggtggcagactgactttggacagtgagaccctgaccttgctgcattgctttgccttcaccaccgctagtctgtttggaaggcttgaggtggggtgtcttgggaaattagggccactacccaagatttgaatttagggagtgggagcagcctcagcagatggggcacccgtgcactgcaggtgttgacaagatccaccatctgtaatgtccttggcacaataaaaccaaatgtcagtttccctgagcaactctattctgtgtgggacacgggtggatgggcctctgggaagcacaggatttgctttgaccagaggtctgcttgttctccagtaggtgctctctgtaagctggggttcatatttgatcttctgtttattaaattaacttcttgtcttgagactgatggcagagaatctctagagcccaggtgggttaagactaacctaacccacataaccaagattgtttcttaaaagaacaaaaccaacaacaactctacaactggtcgtggtcatgcctttgatcccagcactgaggagggcagaggcagaggtggatcttttgagttgcaggccagctgggctatacagcaagacgcttttattaaaaatcataaacttcagaaccaaatcgactgaaactgaagtccctactcccacctaccatatttgcattagggagcctagggctaatttaaaggactgtatgagccagaggccaagactggtgtctgaatttctactctcaaccttaatgctcattcattcttgtgataatctgatgaaataagcaatcactaatgagttcagtgaccagaggtggcccttgcccaactgggttttaaacgttggaggatgaaatggctaaatcctttttttgttgtttgttcctcaggtctgttgacacctctgtccatacccctgctagggtttgtaaagcccagctagagaaggctggctggccctcaggtttcctcagagcagtcttctcccactccccaatgcctcagtgaggtcctttcagaagaaggctgtgtagggtggccctacggtgagggtatggcttgcccagtgggtggctacaggatatctgaaatacgtggtcaagcatgagcacgccaagagggttgattcatttcaaatctacctgccttgtctcactgtgtggctttgggctctctttgactttaaagtgtcccatctgcaactacaggggtcattaatgtctgctacctcatgctctctgatttgtgagtattgacagagaatgtgtatggtcaataatgtactactgggaacagtacctggtacactcttagagcacaaatgttggggttcttaccagactttaggggtgggggtattaccgtattttgtaagtttgtaccatttggcctcagcctgactcttgctactcttggcttttacttgcaatttgccctaaccctatcttcagcaagacaaagggatcacctgaaaaaaccctgtgtgatcccattggcactctcccttctgtctacgactattccgaagaactgtactataaataaacttctgggctggggctgtgatgcttacttatcttgtttgtgtgtgtcttaagatctcccctccactaaagcctgtcaggatcatagggagacacctagggatgctggctgagtaagggacattatgtgttaccttttctgctttgcgtgtattgtctgtgcctgtgactacattgagtcttgagtcaaccagtttctctgaattccagtgtctctggttgagtgtggatgtgtctgtttccgatgaggcttgtttccaggtgtatcagatggtgactgagtgtgggactctgcctatgacagtttgtgtctggtatccgagagaaagaaatgcatgtttgcgtgggtctctcagtgacagtacatctgtagtttgtctggatactttcagtgataagctgcgtgtctgatagtgtgtgattgggtccggcttttgttgatttgcttatctatgtggtgatttagagcccaaggatgactacgtacctgctttggagcagtgcgtgtatgtgtggaacaactgtatattcttgtgacagactctgggtctctcatttctggggcagcacaaatatttctgtgaatgtacatatctggtggtgcttgtgtgcttgtgacaaatctgtcaatttctggtgggggcatatggtattaagtgacccccgtaggacagtacaagtcatatcactgaatgtttcttttcggaacacattttcatgtacacctaggttaggacaagtctacttgaatgtgtctgactatatctttaatggtggttctcccgttcttggtgtacgtgtgggtatgtgagttccacacacgattggaggtcagaaagcaacttatagaagtcatttctcccttttcaccatgtgagtcctgaggtcagcagccttacctgaagaccttttgcttttaagacagtctcactatgttgcccagtctgacctcgctttcagttcccagctccttttttacaaggaagttgtagttcccacaagaactaagtcctgccattatagattcaagacccagactgagtaacagagccaagtctagccaggtttgtataggataatggcagcaaaaaagcaccctacaggtgccaaactgccattgtttcctctgcatcccttccttttgatgacggtaaagaattttacccttccctgaagagtggaccagctctcctataagattacagttttggagcaaaggctgcctgatcttgggtgaaacacacgtgacaggatcctgtctagttccaggctctgatttttaaaagctggtttgtcgttgtctccttactgaactcaaggcagcaaaggtgatggcggcagcaaacctgcatcctaggaaaggaggctgcgctttttaaaagtgtgtacacaccccaccacaccaacaaccaaaacaaacgcagttgtcgcaaaggaattcccagaagcgtgcatgtctgtgtgtccgtctgtctatgtgtgtgcgcgcacgcgcgcgcaccctcctacatttgcatacaggcccttcctccgcggaagaacctggcatgtattttgcataaggggcacttgaaacgttgagggtggcatgcaaataaggactggctcggattggctggggtacagcaggtgccgcgtccggattgatcaaagccaggtgggcgggtctgtcgcgcagggcgactctcccgggaggcgcgtgccccggctcagtagcgttggggctggcgcgcgcgacgaatcttaacgctgcgccgtctgcaggcgcttccgggccgccagattccctgccttccaccctggcgccccccagccctggctctccggccgctctgccnnnnnnnnnnnnnnnnnnnnnnnnnnnnnnnnnnnnnnnnnnnnnnnnnnnnnnnnnnnnnnnnnnnnnnnnnnnnnnnnnnnnnnnnnnnnnnnnnnnnnnnnnnnnnnnnnnnnnnnnnnnnnnnnnnnnnnnnnnnnnnnnnnnnnnnnnnnnnnnnnnnnnnnnnnnnnnnnnnnnnnnnnnnnnnnnnnnnnnnnnnnnnnnnnnnnnnnnnnnnnnnnnnnnnnnnnnnnnnnnnnnnnnnnnnnnnnnnnnnnnnnnnnnnnnnnnnnnnnnnnnnnnnnnnnnnnnnnnnnnnnnnnnnnnnnnnnnnnnnnnnnnnnnnnnnnnnnnnnnnnnnnnnnnnnnnnnnnnnnnnnnnnnnnnnnnnnnnnnnnnnnnnnnnnnnnngcagctttcgaggccgaataccgacttggccccctcctgggtaagggaggctttggcaccgtcttcgcggggacaccgcgtcacggatagacgtcaggtatcccctacaaggggttctcggagggtcaggtgttttggcgaagggtggtggtggggtaccagtgactgggatgccagttgcttcagtggggagcctgcgtctgcaaatgtgtagtagaatcataaggagcagggttgctaggagtgtgagtgcgcgcgtgtgtctgcagtccaggtgggtatgggggtgggcaggattcagggcaagaattctagaagattggcgctttctactagggagggggcagatatcaggactggaccccaagatccatggaattgatgtgcgtgcgcttgtgtgtctgagatggtggggatgttttaaaagtaggtgttaagtgtggagtcgtgagaacaacaatccagatagagttgtcctggagatgaggatgatggaggagggcatgcgacgtcaaaaaaaaaaaaaaaaacaaacaaaacaaaacaaaaagacttggaattcgaatctggggatatgggtcagtggtagattatttgtccaccattcacaagcactgagttcaataaccaacatcgtggcggggggaggggggaggcatgtagaaagacagtgcgagagaaaaagcaaaaggaaaaaaaaaaactacaactcactcccgttctggatttcagggggtcttgatgctttcttaacgagagcccaggcgtaaatatgtttaggtgaacttgcttctgaggacttaaatgctgggtgggcatctgagctccgatggatgtgatatgtatgggaactaggaatacccgggtggagagactggaattgggaagtctgggatcacctgctgcccccttatctcagccttttttctaggtggccatcaaagtaatctcccggaaccgtgtgctaggctggtccaccgtggtgagtgtctttggtgtacgtcatgacccatagactccatcacagaacgcacgcactgctttttttctaggggacatatgactccctgggccctgaaaccatgagaaccccaccagcctgtgattcctgccttcatgtgatagttctgatttcaccacaattcccccagagccctggattctcctttcaaactctcctttctcatccttcttccaaacactgcttttggggctgttcacaggacatgctggtggggaaggaggggcctaggtcactggttgtcatggtgatgctggctgcttctcttctgccacccggagaacgctaacggacatcagggcgggtctgggcaaattgtaggtaagagagctccccctggtgaaccctttaggtagtctgtgccggcccgtggacttggggggggggtttgggggtgagcctgcgcagtagccgattttgcgtcttcgtgagaaaacctgtctgcggctgtgcaagttactgggtctgtaaaggaccccatctgaggcaactggactcttggcagtcgctgcccgttcgggtctggggcaggggcctttgacttgtgctggttgataagcaagactgacaagacagcattcattaaatgtttactctgtgccaggtcctttgcaattaatcagtgtaagtcgttttggacaaatgaaagctgggattggtggtgcgcacctgtgatcccaacgttcaagaggctgggtctctaggatttcagtgaatttgaggctggcttgggtgggctacttggcaaaattctgtctcaaacatgagatagaaatttaaaaaccagaggacacttctgccgtggtttaatttataggcactttgcaaaatacgacatcatttcttagaatgcattatatgctacatcccttctactgactgctctttctgtcttaacatcctgagttttgctgttactaaggatccttgaggtatgctagtgaagaaaactaaccaacacttatacaataatagtatttattaatagtattaatttaataggatttagttccatgctagtccctctttgctgtaaagtacttccatttacaaatacttattgagtatctagtgtgcataaaagctgtcctgatgtggatcttgatgaacatcttgtttacctatcttaggtaaaattatgaagagggacttatattataaaacactttgaagtccaggcatggtggggcacactttcatcctctgggggtagagtcaggtgaatctcttattccagtccagcctggtctatgtagggatcctgtctcaaactccctccccttcaaaacagatgagaacacttcaatttctccaagtatttactgacctactgcatgccagacgtgtatggtctctgttcgtttcactctctgaaggacttgaacctttaaagagggtactagggtctaggaagaggagcccaaccgaaattagtgctttgaaaataaactttgctatgttgaaggcagggctacagacttttaacacttgcctccttcttcttctttcttttgatttcccaccccccagtcagactcagtcacctgcccacttgaggttgcgctgctgtggaaggtgggtgaaggcaatggccatccgggtgtgatacgccttcttgactggttcgaaacacccgaaggcttcatgctggtccttgagcggcctatgcctgctcaggatctcttcgactatatcacagagaaggggccgctgggtgaaagctgtagccgcagcttctttacccaagtcgtggcagctgtccagcactgccacgcccgtggagttgtccatcgggatatcaaggatgagaacatcctgatcgacctatgccggggttccattaaactcattgattttggttccggcgccctgcttcacgatgagccgtacactgactttgatggtaaggatgcttcttctctaccctttagcactcattcttctggcttttcagctttaggctcggcttagcctctgaacattggacccatgtcatacactttaaggttcttgatttctataacactgcatactcaagcctagattccccaataaagttcattttataagtttcttaaccttctgggctcttattttagtgtggagtaggatggggttttgttgggttttttgttttttgttttttttggttttggtgaaatgatcttactgttaattttgaagtactcctttaaagctgtcttgctgctgctaggactctgctgttaaacttggaagtacaggtgttctagccaatggataccctcctttaaatttacagcttgggcttctagggacacaggagttgaggaagggcatcacctgattaggatctaatccttggcttgtgtgcagggacaagagtgtatagccctccagagtggatctcgcgacaccagtaccatgccctgccagcgaccgtctggtcactaggtgtcctactctatgacatggtctgtggggacattcccttcgagagagaccaggagattctggaggctgagctgcacttccctgctcatgtctccccaggtgaggcctgtcactcactcaccccagcccaaccggcttctttcttcccaagcctcccaagcctcgctgactgctaatctcccctgtgcttcttgaccccacagattgctgtgccctaatccgccggtgcctggcccctaaaccctgctcccgaccctcactggaggagattctgctggacccctggatgcaatcaccagctgaagaaaagcccatcaactcctccaaagaaagccccacccccttgccctggtccctgcttccctagacccagccannnnnnnnnnnnnnnnnnnnnnnnnnnnnaacctgtggtccctaatttgggagggggagttacttgtttcttgttctgttaaagatgtttatttggttggattccttccctctgggccctaagattcttaatctgacattgtagtccctacactggcacttcctatactaccacaaaccacgtagacacttagttcaaatgctctcacttgggcaagggtgctttccttaaaattacccccatccccagcagctctttaggcaaagggccttaccctgggatctcattctgttgctgcctgcctgccttagcccagacttggtgattctgggggaggtactgctcattaattagttaatatcccacgcttccttcctttttcttcctttgtttggtgaggggaccctactgttatcccaagtgctcttattccggtgagaagaacctcacttccatgatttgggaaggaatgggagatggacatcaccggacaccaccagagactaggatgggatggatggttttggggggatgagatggaggaaataagtcttattgttgttctcctggggtcccccctttccaacttttgctgcctcctcctgagccaggattgtccagtggttgaaatgtaaataattctgtactggaggtggagagcggcaagtgccctcctgtcccttctccccctgcctggattatttaaaaagccatgtgtggaaacctatttaataaataatgaagtcacaagtggattgccatttatagaagtaggcatctactagatgctgagtttaggaggtagctggagaaaaaaaaaatctctggaaaaaaaacctacagggcttgtctgactggtttggggcgcggtgggggggtgcttagggtcttttgaggcccattctaaccccagacttggagtactgagacttgcttgtacagaaattccaagctaaatcccaggctccaactagaatttttctcgcactttctgtctagcttttaacaatttaattttgtctctacctttcacgcttctcctttgcattttcctcaactcacctcctttaaatttttctaatcctgacaaatctcttcaagtctgcccctcactctcttctattatggtcacggtccctgtccactgtttcactagtcccgccttctctaaagtcccattcctcccacttggcctctggcccttagagggcggcacctggctggaaagggactagaactgattctgacgcgagaagggtggtgctatctggggtttccaataagaagccgagatggcggagcaacggaaccaataaaaccctaggactgtttggacaggtggttacgggcagtcagggtcagtgaggcgggcgcatgagggatgagggccgggtcgagcgtcacgagcatgcaaataagacctgtggaaacgctgcgggagaccgtctgcggcgccccgggtctcctgtttggatggaatctgggaacccgaagccaccatttgagaatctaagctgggaacaggctgagagcccctgcccgtaacccccccacccccgtcccagctaacgccccgccccccccagaggtccggaaacggacgtgatggatacggaagtagcctgctgttgccgaggggacgggacgggcagatgccaacatggcagcggttggggttggtggatctaccgctgcggccggggctggggctgtgtcctcgggcgcgttggaacctgggtccactacagcgggtgaggtggcctgacgtagaggcgttgcctaatcggaggtcgggattcttgagggtgggatgaacctagactgaagtgacagctcatcccgtgtgaacggacctacgtgttagtgtatgtgtgcgtgcgttgtgaggaaaaaggaaggagagaatggaccatcgtatgttgcggataggaatcggtcgttctatgggtgactgtggctggggtcctggattttcaaataaagaccgttgtgaatgtgcggggaatttccttttgaggagggcaagaacattgataatgttcagagggggatggtaatccctaactgtggaagggagcgacgattgtcggggtgagagttcttccttatagaagggtggtggcttccttataaagggaccttataaattgtcagggtggggcacatccttgtatgactagtggatccattttgagcatgaagctgcccttcattacatggagagaatatcctgaggatgttcctcccaaatggagctagttctatttgtgttgaggtgggagagttccttcttataggtcagaaagaacattctgagggggccaagtgcttctacatggtagagagagctcattgcaagtgtgggtagaacaaagactaattcattggctgggagaaggacgtacagtagagggaggatgggccatatgcagtagggaagtatttccatatgtgattaaagtaatcaaactattggggtaatcatatgggatggagaaatagaacaagcctcaggaggtggacatctttaaacaattgtcccattcattatattgcaacattatttcatttataggacattcctacaagtagaagcatcacttcatagaaatcctcaatttccttatccacaaaatggacattttcctagtacctttagaaatcaagtgatgggaatctgtgtaaatcccttagtacagtgataggcatagtgtaggtattcaataaatattggcaatgctgtctgagaaagagtggcttccccaggaatggagaagaagcaaacatgtgtgtccagagcctgccctggtcattttcttatacaaagggtttcagattaagagctagtcagactggagcccacttctccctgtcttgctcctttttgccagtagctgagggtgtggaaacaggtccagatcagactctcattgagttaagatgggcaagcagaggaagtcccaagagccagaagatttttgattgagaaaagaggaatgaggtgggtggccataccccagtagcctctgactccttcctcctatgtgttccttccactccctgcagctcaccggcgcctcaagtatatatccttagctgtgctggtggtccagaatgcctccctcatcctcagcatccgctacgctcgcacactgcctggggaccgcttctttgccaccactgctgtggtcatggctgaagtgctcaaaggtctcacctgtctcctgctgctcttcgcacaaaagaggggtatgagtcaccaatggggttggttggtgggactccctaagttaagggtgtaagtacccctgggaggtttgctgggagagtagactggtgtgtctgaggatgcttgaggagtaggtaggagcttttaagcttcctgaccactgcagctatgtgaagttgcatctccacgtggatattccttatacctgagaactacaccagtgagattgactgcccacaggcaacagaagacccacggtgattgaaaggtagaggcatgaagatcaggagctcaagataacataagttcaaggttagcctcagctacatgtgattatctgaaaaagaaaaagaaaagaaaaacttttgtaatatggagaatcccatttcatacgtataaaatagtaaaaatgtgcttctgtacatgacccaggttcacaattatcaactcttggttacagtggcataaaacagcatcagtggcgagccgctcaaggctaatctatatatatatcttttacatatctgcacctttatagtaccaggtgggtgtagcatcgtgcacattttttgtttgtttttcaaggcagggtttttttgtgtagccctggctatcctggaacttattctgtgaactagactggcctgcctctgcctcctaaatgctgggattaaagatgtgcacccccaaggcccagctatgtcgtgtacttgtaactgcagctgttccgtatgcgtggg

SEQ ID NO: 306 - DNA, 3867 bp, Mus musculus
gcgtttgctttgctgtggggtacttggcggtgccgccatgactattctccccaaaaagaagccgccacctcccgacgccgacccggccaacgaaccgccgccgcccgggccgctgcccccggcgcctcggcgcggtgcgggtgtaggcgtgggtggcggcggcacgggtgtgggcggaggagagcgcgaccgtgactccggcgtcgtgggggcccgtccccgggcttcgccgccacctcagggcccgctcccggggccgcctggtgctcttcatcgttgggcactggccgtgccgcctggcgcagtcgcgggccctcggccacagcaggcttctccacctccttgtgggggccccggtggccccggcggcggtcctggtgacgctcttgttggcggggccagtccggaacgtgaagaggtcggagcgggctacaacagtgaagacgagtatgaagctgccgcagcgcgaatcgaggccatggatcccgccactgtagaacagcaggaacactggtttgaaaaggccttgcgggacaagaaaggcttcatcatcaagcagatgaaggaggacggtgcctgtctatttcgggctgtagctgaccaggtgtatggagaccaggacatgcatgaggttgttcgaaagcattgcatggactatctgatgaagaacgctgattacttctccaactatgtcacagaagacttcaccacctatatcaaccggaagcggaaaaacaactgccatggcaaccacattgaaatgcaggctatggcagagatgtacaaccgtcctgtggaggtgtatcaatatagcacagaacctatcaacacattccatgggatccatcaaaatgaagatgaacccatccgtgtcagctaccaccggaatatccactataattcagtggtgaatcctaacaaggccactattggtgtggggctgggcctaccgtcatttaagccagggtttgcagagcagtccctgatgaagaatgccataaagacatcagaagagtcatggattgaacagcaaatgctggaagacaagaaacgagctacagactgggaggccacaaatgaggccatagaggagcaggtggctcgagaatcttaccttcagtggctgagggatcaagagaaacaggcccgccaggtccggggacccagccagccccggaaagccagtgccacatgcagttcagccacagcagcagcctccagtggcctggaggaatggactagtcggtccccacggcaacgaagttcagcctcgtcacctgagcaccctgaactgcatgccgagctaggcattaagcccccttccccaggcactgtgttagctcttgccaaacctccttcaccctgtgcaccaggtacaagcagtcagttctcagcagggggtgatcgggccacctctcctcttgtgtccctctaccctgctctggagtgccgggccctcatccagcagatgtccccctctgcctttggtctgaatgattgggacgatgatgagatcctagcatcggtgctggcagtgtcccaacagggaatacctagacagtatgaagaaaaacaaagtgcacagagagccaccccccagacaagagttgatggacaccccagggactggacatcattcccgatcccccactcctgccctttgatgccacccaaacttctttggctttcttccctcttggcttccttcttttgtttcctcttttccttttttttttccacttccctctggccggcccacccatgcgctccatccatctcatccctgccaccaccattggtctctgccagctgaagtgccctattgcccccgcacagcaccatctcagcattccacaggggactctggaaagggtgcggaaggtaggcaagaggcccacagagacagaccatctggcagccaggcagccccagaagagagacattcagacaaaggaagtcttctgctcacccttccttaaagatcagataaacttgtcatcccttcccagcaatgatgacaggaaaatggaagtggcaagttttccttctagtatccgaagaatctgagccttcaatgttaaaatttttcttaattaaaatgtgctttatttcacaaaatcaacaaatcaaaaagaatattcatggcaacgttggtcctttgagggtggcatctctggtttggagctaggcaggctggccatgggacagaaagggcagaaaaaagatggatttctgctgtcttttggcccctagttccttggaagggcaaaggctatgaggtagagggaggtgacaggcattgcaggtggcagactgactttggacagtgagaccctgaccttgctgcattgctttgccttcaccaccgctagtctgtttggaaggcttgaggtggggtgtcttgggaaattagggccactacccaagatttgaatttagggagtgggagcagcctcagcagatggggcacccgtgcactgcaggtgttgacaagatccaccatctgtaatgtccttggcacaataaaaccaaatgtcagtttccctgagcaactctattctgtgtgggacacgggtggatgggcctctgggaagcacaggatttgctttgaccagaggtctgcttgttctccagtaggtgctctctgtaagctggggttcatatttgatcttctgtttattaaattaacttcttgtcttgagactgatggcagagaatctctagagcccaggtgggttaagactaacctaacccacataaccaagattgtttcttaaaagaacaaaaccaacaacaactctacaactggtcgtggtcatgcctttgatcccagcactgaggagggcagaggcagaggtggatcttttgagttgcaggccagctgggctatacagcaagacgcttttattaaaaatcataaacttcagaaccaaatcgactgaaactgaagtccctactcccacctaccatatttgcattagggagcctagggctaatttaaaggactgtatgagccagaggccaagactggtgtctgaatttctactctcaaccttaatgctcattcattcttgtgataatctgatgaaataagcaatcactaatgagttcagtgaccagaggtggcccttgcccaactgggttttaaacgttggaggatgaaatggctaaatcctttttttgttgtttgttcctcaggtctgttgacacctctgtccatacccctgctagggtttgtaaagcccagctagagaaggctggctggccctcaggtttcctcagagcagtcttctcccactccccaatgcctcagtgaggtcctttcagaagaaggctgtgtagggtggccctacggtgagggtatggcttgcccagtgggtggctacaggatatctgaaatacgtggtcaagcatgagcacgccaagagggttgattcatttcaaatctacctgccttgtctcactgtgtggctttgggctctctttgactttaaagtgtcccatctgcaactacaggggtcattaatgtctgctacctcatgctctctgatttgtgagtattgacagagaatgtgtatggtcaataatgtactactgggaacagtacctggtacactcttagagcacaaatgttggggttcttaccagactttaggggtgggggtattaccgtattttgtaagtttgtaccatttggcctcagcctgactcttgctactcttggcttttacttgcaatttgccctaaccctatcttcagcaagacaaagggatcacctgaaaaaaccctgtgtgatcccattggcactctcccttctgtctacgactattccgaagaactgtactataaataaacttctgggctggg

SEQ ID NO: 307 - protein, 579 aa, Mus musculus
MTILPKKKPPPPDADPANEPPPPGPLPPAPRRGAGVGVGGGGTGVGGGERDRDSGVVGARPRDPPQGPLPGPPGALHRWAVPPGAVAGPRPQQDPPCGGPGGPGGGPGDALVGGDEREEVGAGYNSEDEYEAAAARIEAMDPATVEQQEHWFEKALRDKKGFIIKQMKEDGACLFRAVADQVYGDQDMHEVVRKHCMDYLMKNADYFSNYVTEDFTTYINRKRKNNCHGNHIEMQAMAEMYNRPVEVYQYSTEPINTFHGIHQNEDEPIRVSYHRNIHYNSVVNPNKATIGVGLGLPSFKPGFAEQSLMKNAIKTSEESWIEQQMLEDKKRATDWEATNEAIEEQVARESYLQWLRDQEKQARQVRGPSQPRKASATCSSATAAASSGLEEWTSRSPRQRSSASSPEHPELHAELGIKPPSPGTVLAKPPSPCAPGTSSQFSAGGDRATSPLVSLYPALECRALIQQMSPSAFQDWDDDEILASVLAVSQQGIPRQYEEKQSAQRATPQTRVDGHPRDWTSFPIPHSCPLMPPKLLWLSSLLASFFCFLFSFFFSTSLWPAHPCAPSISSLPPPLVSAS

SEQ ID NO: 308 - DNA, 4232 bp, Mus musculus
cagagagctcggccggccttggagggagacaaggctgcgaccaatccgtctccgtaccgtcccactggacttcacatccgggatctcctcctgggcgtgacccgcgtcccgtctgcggtcctcgaaccggtgtcctgatctctttatccaggccttgctgttcccgtcgtgcctcgcgcacgaccgtagccccctcatccgggttctctcccggcgttctccgcgtttgctttgctgtggggtacttggcggtgccgccatgactattctccccaaaaagaagccgccacctcccgacgccgacccggccaacgaaccgccgccgcccgggccgctgcccccggcgcctcggcgcggtgcgggtgtaggcgtgggtggcggcggcacgggtgtgggcggaggagagcgcgaccgtgactccggcgtcgtgggggcccgtccccgggcttcgccgccacctcagggcccgctcccggggccgcctggtgctcttcatcgttgggcactggccgtgccgcctggcgcagtcgcgggccctcggccacagcaggcttctccacctccttgtgggggccccggtggccccggcggcggtcctggtgacgctcttggtgcgacaactgcgggggtgggcgcggcaggggtggtggtgggcgtgggtggtaccgtgggcgtgggcggctgctgctcggggcccgggcacagcaagcggcggcgtcaagctcccggcgttggcgcagttggcggggccagtccggaacgtgaagaggtcggagcgggctacaacagtgaagacgagtatgaagctgccgcagcgcgaatcgaggccatggatcccgccactgtagaacagcaggaacactggtttgaaaaggccttgcgggacaagaaaggcttcatcatcaagcagatgaaggaggacggtgcctgtctatttcgggctgtagctgaccaggtgtatggagaccaggacatgcatgaggttgttcgaaagcattgcatggactatctgatgaagaacgctgattacttctccaactatgtcacagaagacttcaccacctatatcaaccggaagcggaaaaacaactgccatggcaaccacattgaaatgcaggctatggcagagatgtacaaccgtcctgtggaggtgtatcaatatagcacagaacctatcaacacattccatgggatccatcaaaatgaagatgaacccatccgtgtcagctaccaccggaatatccactataattcagtggtgaatcctaacaaggccactattggtgtggggctgggcctaccgtcatttaagccagggtttgcagagcagtccctgatgaagaatgccataaagacatcagaagagtcatggattgaacagcaaatgctggaagacaagaaacgagctacagactgggaggccacaaatgaggccatagaggagcaggtggctcgagaatcttaccttcagtggctgagggatcaagagaaacaggcccgccaggtccggggacccagccagccccggaaagccagtgccacatgcagttcagccacagcagcagcctccagtggcctggaggaatggactagtcggtccccacggcaacgaagttcagcctcgtcacctgagcaccctgaactgcatgccgagctaggcattaagcccccttccccaggcactgtgttagctcttgccaaacctccttcaccctgtgcaccaggtacaagcagtcagttctcagcagggggtgatcgggccacctctcctcttgtgtccctctaccctgctctggagtgccgggccctcatccagcagatgtccccctctgcctttggtctgaatgattgggacgatgatgagatcctagcatcggtgctggcagtgtcccaacagggaatacctagacagtatgaagaaaaacaaagtgcacagagagccaccccccagacaagagttgatggacaccccagggactggacatcattcccgatcccccactcctgccctttgatgccacccaaacttctttggctttcttccctcttggcttccttcttttgtttcctcttttccttttttttttccacttccctctggccggcccacccatgcgctccatccatctcatccctgccaccaccattggtctctgccagctgaagtgccctattgcccccgcacagcaccatctcagcattccacaggggactctggaaagggtgcggaaggtaggcaagaggcccacagagacagaccatctggcagccaggcagccccagaagagagacattcagacaaaggaagtcttctgctcacccttccttaaagatcagataaacttgtcatcccttcccagcaatgatgacaggaaaatggaagtggcaagttttccttctagtatccgaagaatctgagccttcaatgttaaaatttttcttaattaaaatgtgctttatttcacaaaatcaacaaatcaaaaagaatattcatggcaacgttggtcctttgagggtggcatctctggtttggagctaggcaggctggccatgggacagaaagggcagaaaaaagatggatttctgctgtcttttggcccctagttccttggaagggcaaaggctatgaggtagagggaggtgacaggcattgcaggtggcagactgactttggacagtgagaccctgaccttgctgcattgctttgccttcaccaccgctagtctgtttggaaggcttgaggtggggtgtcttgggaaattagggccactacccaagatttgaatttagggagtgggagcagcctcagcagatggggcacccgtgcactgcaggtgttgacaagatccaccatctgtaatgtccttggcacaataaaaccaaatgtcagtttccctgagcaactctattctgtgtgggacacgggtggatgggcctctgggaagcacaggatttgctttgaccagaggtctgcttgttctccagtaggtgctctctgtaagctggggttcatatttgatcttctgtttattaaattaacttcttgtcttgagactgatggcagagaatctctagagcccaggtgggttaagactaacctaacccacataaccaagattgtttcttaaaagaacaaaaccaacaacaactctacaactggtcgtggtcatgcctttgatcccagcactgaggagggcagaggcagaggtggatcttttgagttgcaggccagctgggctatacagcaagacgcttttattaaaaatcataaacttcagaaccaaatcgactgaaactgaagtccctactcccacctaccatatttgcattagggagcctagggctaatttaaaggactgtatgagccagaggccaagactggtgtctgaatttctactctcaaccttaatgctcattcattcttgtgataatctgatgaaataagcaatcactaatgagttcagtgaccagaggtggcccttgcccaactgggttttaaacgttggaggatgaaatggctaaatcctttttttgttgtttgttcctcaggtctgttgacacctctgtccatacccctgctagggtttgtaaagcccagctagagaaggctggctggccctcaggtttcctcagagcagtcttctcccactccccaatgcctcagtgaggtcctttcagaagaaggctgtgtagggtggccctacggtgagggtatggcttgcccagtgggtggctacaggatatctgaaatacgtggtcaagcatgagcacgccaagagggttgattcatttcaaatctacctgccttgtctcactgtgtggctttgggctctctttgactttaaagtgtcccatctgcaactacaggggtcattaatgtctgctacctcatgctctctgatttgtgagtattgacagagaatgtgtatggtcaataatgtactactgggaacagtacctggtacactcttagagcacaaatgttggggttcttaccagactttaggggtgggggtattaccgtattttgtaagtttgtaccatttggcctcagcctgactcttgctactcttggcttttacttgcaatttgccctaaccctatcttcagcaagacaaagggatcacctgaaaaaaccctgtgtgatcccattggcactctcccttctgtctacgactattccgaagaactgtactataaataaacttctgggctggggctgtgatgcttac

SEQ ID NO: 309 - protein, 622 aa, Mus musculus
MTILPKKKPPPPDADPANEPPPPGPLPPAPRRGAGVGVGGGGTGVGGGERDRDSGVVGARPRDPPQGPLPGPPGALHRWAVPPGAVAGPRPQQDPPCGGPGGPGGGPGDALGATTAGVGAAGVVVGVGGTVGVGGCCSGPGHSKRRRQAPGVGAVGGDEREEVGAGYNSEDEYEAAAARIEAMDPATVEQQEHWFEKALRDKKGFIIKQMKEDGACLFRAVADQVYGDQDMHEVVRKHCMDYLMKNADYFSNYVTEDFTTYINRKRKNNCHGNHIEMQAMAEMYNRPVEVYQYSTEPINTFHGIHQNEDEPIRVSYHRNIHYNSVVNPNKATIGVGLGLPSFKPGFAEQSLMKNAIKTSEESWIEQQMLEDKKRATDWEATNEAIEEQVARESYLQWLRDQEKQARQVRGPSQPRKASATCSSATAAASSGLEEWTSRSPRQRSSASSPEHPELHAELGIKPPSPGTVLAKPPSPCAPGTSSQFSAGGDRATSPLVSLYPALECRALIQQMSPSAFQDWDDDEILASVLAVSQQGIPRQYEEKQSAQRATPQTRVDGHPRDWTSFPIPHSCPLMPPKLLWLSSLLASFFCFLFSFFFSTSLWPAHPCAPSISSLPPPLVSAS

SEQ ID NO: 310 - DNA, 56345 bp, Homo sapiens
gggcacaaacaagaccaactttacaagcatccctgcggccttctggtataccattgtcaccatgaccacgcttgggtgagtgtggactctgcgttgggggctgcccgattacactcaccctttctgtaaaattaggaagtttaaaggaatgatctctttctttctttctttttaaatggagtcttactctgtcgcccaggctggagtacagtggcaagatctcagctcactacaacctctgcttcctgggttcaagtgattctccagcctcagactcccaagtagctgggattacaggtacacgccaccatgcccagctaatttttgtatttttagtagagacggggtttcaccgcgttggccaggctggtctcaaactcctgacctcaggtgatccgcccgccttggccgcccaaagtgccgggattacaggtgtgagccaccgcgcctggcctctttctctttttgagcttcagtttgctcatctgtacaaactgagggagctggacttaattcttcagatccctcccagctctgacaatgccttgattttctaggtcaggagacttgggttcaaggattgtcttagctgctctctttctgttgatgtcgttttctcatggcctcagttttcccctctgtaaaatgggaaatgctgatcccttcatcatctagagaggattcaatgacatcatagttgtgaaagttctctgaatgtttctggtgcaggatacataggtgttggctttctagcacctttttctgttttggggacccatgtctcccaaccttctagaattgtctgctgtgtggggcactacttctgagcctttgtgattccttgatgtttcccagaacaagatgttttcagcatttttattattattatttttttgtcgatccctgcagaagaaacagagttgggataaaagtatcaaatggaatcatcgaactcatgagctttccaaagatactgtctagggcagatgctgtgatccttctctaagtttccatcactgggattgggtatacagttggtgctcagtatctgttgaaggaatgactgaatgaattgggtttgctcagtttcttcatagaggtacaaaaaaaagttgatttggggtttctaaagcgtagaaaccccaattctggttggaggtccaggatcagactgacaaacaaatactgagcgctgacagtgggctggaactgagtattttgatggcttttactctattcaagtcctcacaacaactctgtgatggtggatggctgcccatgtctcacagttgaggacacgctctgagatgacacatcacagagccagcaatggccaagttggaaagacttttgagcagagtcctgaatgcttaaaatgagtgaaaataccgaaataaggaacagccatcctagggcacagcctgagaaaaggcttagaggctgaagactgcagaggctgtgtttctctggaggagttctgattggttctgcggtcagaacaagagtatgcagtgtgatcttgggcgagtcagttacagaatctccctgatcttcaggggagctctctgtgaacaagttagtaaggttggctctgctctgtctctgtgggaggtgggtggcatggagaaaggcaggagggtttcaaggctcctccctattttgtcatatgtggacagttttcaaggattcccctataggggaatgaaaaggggtcctacctagagcaggtaagacagaggcagccaaaaccaacaaaacactcctcccgggacttgaagcccttcggctggcctgtggtgctgggactctctccccaggaggctgtgttcactgcctgtgacttcctcatgctcccctctgcttggttttcatagatttctagctgactcaggtgcttggtatgtagcttggacaggggcagcagatggtaggggttgagggccaggcccatttctcacttggccacccagcattttacagagcaagaaactgagggactcagaaggtttgagtgcctggccagggtcacagagctagtccggattagatgggatggagtgggggactgaaaggtaggtgggcacttttcctgaccttggcctacctcccctcgctccagctacggagacatggtgcccagcaccattgctggcaagattttcgggtccatctgctcactcagtggcgtcttggtcattgccctgcctgtgccagtcattgtgtccaactttagccgcatctaccaccagaaccagcgggctgacaagcgccgagcacagcaggtaaccgcactttccatccgagcacctcctactccccacaccccaagccagtctactttggggcttacccacctgaccttttatctcctctctctgcagaaggtgcgcttggcaaggatccgattggcaaagagtggtaccaccaatgccttcctgcagtacaagcagaatgggggccttgaggtgggtcggggcctggatagggttggggtgagccataacggggaggaaggtgctgcccttatcgctctgctccatctactccaggacagcggcagtggcgaggaacaggctctttgtgtcaggaaccgttctgcctttgaacagcaacatcaccacttgctgcactgtctagagaagacaacggtgaggcctaatgtgaggtgatatagcagaatagagggggtccctctgcggccatgccagctctctcccttggatgggaggctcactacaaattgtggaaatcacacagagcttcctggaagaggctacaggagagccaagccttgaagaatgggcaagggaagggaagagggaacaatgtccagaaaggagaaaacagcctgagcaaaggcttgagggtgggatcagctcccatgggatgccccgtgaccctgcctcccttctgcccatagtgccatgagttcacagatgagctcaccttcagtgaagccctgggagccgtctcgccgggtggccgcaccagccgtagcacctctgtgtcttcccagccagtgggacccggaagcctgctgtcttcttgctgccctcgcagggccaagcgccgcgccatccgccttgccaactccactgcctcagtcagccgtggcagcatgcaggagctggacatgctggcagggctgcgcaggagccatgcccctcagaggtaagcagccctcctacctgctagccacacctggggaagctcagagcttagaccagtagctctgagatttcataactccaggcctagcaagtcaagctcgaacccaaacccctccatgctggaagcttgggcttatcttgtctggaactcattcttcatccattcttttttttttttttttgagacggagtctcactgtcacccaggctggagtgcaatggcgggatctcagctcgctgcagcctccacctcctgggttcaagcgattctcctgcctcagcctcccaagtagctgggactacaggcacgtgccaccatacccggctaatttttgtatttttagtagagacggggtttcaccatgttggccaggatggtatcgatctcctgacctcatgatccacctgccttggcctcctaaagtgctgggattacaggcgtgagccaccgcgcctggctgcattttttttttttttttctgagacgaagttttgctcttgttgcccaggctagagtgcagtggcgtgatctcggctcactgctgcaacctctgcctcccgggttcagacgattctcctgcctcagcctcctaagtggctgggattacaggtgtccgccaccatacccagctagttttttatatttttatttttttatgtttatttttatttatttatttatttttgagacagagtcctgctctgtcgcccagactggagtgcagtggcgcgatcttggctcactggaacctccgcctcccgggttcaagcaattctctgccttagcctcccaagtagctgagactacaggtgcgcgccaccacgcccagctaatttttgtatttttagtagagacagggtttcgccatgttggccaggctggtctcaatctcttgaccttgtgatctgcccactttgacctcccaaagtgctgggattacaggcatgagccaccacacccagccaattttttatatttttagtagagatggggttttaccatgttggccaggctggcctcaaactcctgaccttcaggtggtccacctgcctcggcctcccagagtgctgggattacaggtgtgagccaccactcttggctggtgatgcagttttagtagtgtggtcagagaaggctttactgaggtgacaactgagccaagacctgaaggaggcaaaggagtgggccatgcagataactagaggaagagctttctaagcagagtgaacagcctgtgcaaaggccttgaggcagatgtgggtccacattagagacatagcaaggaagctatcatgggtggaggagagtgagctgggggagactggtaagaggcaaactcagaaaggagcgagggtcccaccttagatcctactatggacagtttgtaaggacttggacactgttaggagtaaccatgagagatagcattttcatatgtatgcacattgtgttccagacactgctctgagcacttcgtatcatttttaatctcatttaatctccacagcaaccctatgaggtgggagatagtgttcgtcccatgctacagatgagagaagagagaggtttggagtggttaaagtgggaccaggatttgaacccaggactatctgactctagagtcctcactctttaccaccataattggggatgcaggagaagtacttaagtacttagcacagtgccagggacccagtaggtgctcaataaatgccatgattgctgtggcaagtattaattttttttttttttttgagacagagtctcactctgtcacccaggctggagtgcagtggtgcaatctcagctcactgcaagctccgcctcctgggttcacgccattctcctgcctcagcttcctgagtagctgggactacaggtgcctgccaccacgcctggctaattttttgtatttttagtagagatggggctttaccgcgttagccaggatggtctcaatctcctgatctcgtgatccgcccgcctcggcctcccaaagtgctgggattacaggcatgagccacagcacccggctgataactttttttctttttttttttttgttgagacagagtctcattccgtcacccaggctggagtgcagtggtgcaatctcagctcactgcaacctctgcctgccgggttcaagcaattctcccgcctcaacctcccgagtagctgggattacaggcatgcgccaccatgcccagctaattttttgtatttagtagagacggggtttcatcatgttggtcaggctggtctcgaactcctgacctcagatgatccactcacctcggcctcccaaagtgctgggattacaggcatgagccaccgcacccggcctaagataactttttaagagccttccatcttctccacccttgtccacagccgctccagcctcaatgccaagccccatgacagccttgacctgaactgcgacagccgggacttcgtggctgccattatcagcatccctacccctcctgccaacaccccagatgagagccaaccttcctcccctggcggcggtggcagggccggcagcaccctcaggaactccagcctgggtaccccttgcctcttccccgagactgtcaagatctcatccctgtgaggggtaggcctgctgattcagagggtcctcttcatttttgggaactcctttccaaagccatatttttgggaggcagagaggggcaggcttgggcaccccttctgccccccccactgagaactatgcaatggagtttcatgaaatggtccacatagtggggaagtagccaggaaatgagaaacttcctcccaccccagacatttttcctggtgggagctgaagcactgggcttccacaggcccctggcctccttgccctagcacactgggactggccccactctcccagctggactcctgcatgctcctccccttgggctctcagatgaaggcaaagctttgatccgacatctgagctctagcctaagaaggagagttgagatttcctcctccctctggctgggatatggagctttggaggttcagagaagagaaccctcacctctgatctggcctctacgagaggtcctcatctccatctggcccaacaattcccagattctgaagcttggaatgcaaacacaggcttcatgggctgtggcctctgcagcgacctgccatccccaggccttgcctgaggggtcaggctgcctctcccaacacacactcagatagcacaaattctaccatccccttccctggctgctggaaatggaccccgcaaccctgtcctctgctgggcccccagcaaactctagcaatagcagctgctgccgtgtcattatgcaaagcctctgaccagtttgctgcagcatttacatctgccctaatcagaggggccacctctaactcctcctcctcctctcttctcctctggtttgcgtccttcctgggttgggctggagtctggactggctgagataagagcctggcaaccagcaagagctgggctgtatttggagatcatgggctgattccatgttcttgggcaacagtccagaagcatcaggggctccggcctgggatgtttctgaactttgggagttataggagacaggaggaacttctcctcctcctcctcccctacaattccttttcacatattcctttcttctccctcttgggtgaccttccaaaactctgctctcaggctgaaatctggcatcatctcaggttccctgtccccagcactgtccccatggagctggtggctgacaaagatgtagtttccatcagtcaataaaacctgagaggagagatgaggactgagagtatctcctggctctgtgggtttgggggctgggttgggcttgggggttgaaaacactctgatttcaatcccttttggctaggagaagggctggtatgggtcaaggtatgggagatggatggttggtgatgtattctggaagatggggatccaggagaaatgaaagagtgtggtttgaggagttcatctacagccagtgagacaggccagggggtcctgagacattcctccttggatatcatctgcgccagcttcctgattcacagatcgggaaactgagacccagagaaacacatagttagttagaggaggcttaaacccaggcttcctgacagcaaacaaccctgaatttaaccctaataaaagcatcactttgtttggtgaatttcccttccttgtggacgccccctacattctctcttctgggctactggctacactaggctagtgtgtggctgagttctatagagcactgagcagacagaccatggattcaggttgatctgggttccaatccctgggtgagagaatcacttaccttctcttgcctcaggttgctagtctgtgaaatagggataattcatttagtcaccaaatatttattaacttccatcatgtgccagccctagggatacaaaggtgggcaaagtagacattgtctctgatgtatagttgagcatggaaggcagacaagtaattacaacatggtgtggcagaactaagatccatgtgttatagaggcatgcagatggcaggagaacttaacctggccaacacacagggaatgagttggagttagccaggcagcaaatgaaaggatgcaatgttctgggcagagggaacagcatgtgcaatgacctggaggttggagagtgagctcaggcctttggggaactgaaagtagttcagtccagctggggaggagagtgtgaggctgtgaggagaggaaggatggagaggtaggctagataataaaaagctttgaagctatgacgcgaattttaaacttcatcctaaagatagtggggacctctaaagacttaaacagaaaactcatgatgaagtttgtgtttcagaatgatcattctggctgtggagagtggatatagagaaacagtcctggaaggaagaaaagtagggtggaggcttttataatagtccaggtggtaggggacagtggcttggaccagagtagtggcagtagaattggagagtctagagatttgggaggcagaattggcaggacttgggattgacaggcatgtgggagttgaggaagagggagcagtcaaagttgactcccagtttctggcttggacgacggctggatgggagtgctattccctggtaaagggaacatcagagctgtcagcactcagtgctaggtacatagtaagtacttggtgaagggtagccatgattgctatcatgagttcagttttagatgtgtagtgagtgaaatatatggggctggagtgagatgatcatgagaagattcaatgtgataatgtgcataggcatttggcacagagccctgaacacaacaggcccggtaaacgtgaaagtcccctcctattaagtctcatgagcagaaaacactacttagagcccatttattacttacacctttcagggaagaatttcaactagggttagtatctcaagggaggcaaggctatactcaaaacagctttcccatggtctctttcagtcaacctgttgtatggtttgtctcctaagactggaagtgaactccaaataccttcttggttcatcagctcatctgaaccccataaccattccctgaggtagtctgggcaggtattatcattcctgttttacacatgggtaatctcaaaagtgacacaatgacttgctcaaggtcatacagttggtaatggtccatctgtgcctggaactgaggtctttctggctccaaagcctgggatccttccactgcaccaccatgcagactactttattgaacacttcctatgtgctgggcacagcaccaggcccttcacaagcattaatctctgatcctcggattagaattattgccaatttatagaatagaaattaaggatgggtgctcacttcgcaccacatatactaaaattagaacgatacagagattagcatggcactatgcgaaaggatgacacgcaaatacgtgaagcgttctataaaaaagtaaacaacaacaacaaaaattgaggacggggtgggttttaaatgactgacaaagatcactcagacaggaagggcagagctaggattagcgtgtagctctccagctactcaatagcagggattctgccaaccccattttgagacgctgactggtgacagagctttcataaacctcgatcgacccaagcaaactcagttttagaaaaaggctgggcttggccaggcgcggtgactaacgcctgtaatcccagcactctgggaagccgaggcgggaggatcgcttgagcccgggagctggagatcagcctgggcaacatagtgagactttgtccctacaaaaaagtgaaaaaaaaattagccggtcgtagtggtgcgcgcctgtggtcccagctattcgggaggctgaggcgggaggatcgcttgaacctgggagttggagtttgcagtgagctatgatcgcgccactgcattccaacctgggcgacagagtgagacccctgtctcaattaggaaaaaaaaaaaaaaaaaaaaaaaaaaggctgggccgcgcctgcgcactagccataggggcggggaggtcaacgcgaggccgagagtgctgtggtgccagagaaggcgtgtctgtttcccaaacaaccactgtccccacggcgcctgtctgtcccaaggttggtcggtatgccgcgagtgacggcgtctcttaaccaatcaccgcagaactcaggctgttgccggggcgaagcggtgtccgcctcccccggaagggtatttgtaggtgggtgggaccggaagtgacgctacaggggccagctatgctcccgggagtgttgatgttttccagtcattccggctgacagcgttcaagttggaatcctggaggggaggtgtttttcctgtcgtacgtgggacaggccacgctgtccgtccgcagtaccgacgcctgcaggtcagagcttcggggagaaaagtgaagagcaagacggaactgacggggagaaaggctgggaaccagggtgtcgactttgactgaaatttgagacggagggcaccggagggcgagcactcgcctgtgattggcccgtgggcgtcgtcgaggtcccacgcagctgctcaattggttggtgttgcaattgttgtggcggcggcggcggcgattttgcccacgtacttccgagtaaggggcggggctgtgccctggcgcgcgtgcgcagcgccccggggccccacccggtagtgcaagaacctgcgagggggcggagcgaagaggtgcttgttttggttctgtttcctttgaagcagaaggccggaacaagcgtagcaataaacttgctggacttggagagaaggctaagacaaactcgccgcactgccttcatcttggactttacatccgggttctcctctcggcgtgacccgcgcgccgccaccgccgccgccgccgccgccgccgcctccgccgccgagggttctcgaaccggtgccgcgatccctttatccgggtctcgccgttcccgtcgtgcctcgcgcactacactagccccctcatccgggttctctcccggcgtgccccgcgccgggtttgttggggggtactcggcagtgcagccatgactatactccccaaaaagaagccgccgcctcccgacgccgaccccgccaacgagccgccgccgcccgggccgatgcccccggcgccgcggcgcggcggaggtgtgggcgtgggcggcggcggcacgggcgtgggcggcggcgatcgcgaccgtgactccggcgtcgtgggggcccgtccgcgagcttcgccaccgcctcaaggcccgctaccaggaccgccgggcgctcttcatcgctgggcgctggccgtgccgcctggtgcagtggcgggtccccggccacaacaggcttctccacctccttgcgggggcccaggtggtcccggcggcggtcccggcgacgcgctgggcgcagcggcggcgggtgtgggtgccgcgggcgtggtggtgggtgtgggtggtgccgtaggcgtgggcggctgctgctccgggcctgggcacagcaagcggcgacgtcaagctcccggggttggcgcggttggcgggggcagtcccgagcgtgaggaggtcggcgcaggctacaacagtgaggacgagtatgaggcggctgcagcacgcatcgaggctatggaccctgccactgtcgagcaggtaagagctgtggggtgaggggtgagcggccacggcagatgggacccccagactgtgaagggactcaaggaaggctgtttgagatcgccccaagggatctaggcgttttcactgggcctgacagtcttctctggcggtagggatgtgagacaccttctttcctcccctccaggattttggggctagaggcctacggtaaggtgtcagacttaaagatccgaggtctcttttaaggtctatagtcgtcattccagtccctgggacctcatcatatagggccaataggtgggaattctccaagagatacaggtaggatcgcgcccctcttgagtaggagtctcaggtctcccaagagacttaggtatgtgttcagtggcttaagagctcttttcctctgggatagaagtttgagattccccttccaggaaagtcaaataaggtggagacctcggagatcggggctgaacatccccaaggagcctaagccctttcaagagtctgagacactctgcatataggacaatcctctcccgcttcgctgggtaacactgcacaggaccactgaatagccagacctgagacctcaagggtcctaagtctgtcttcaggggcctgagagtcctgcttctagaatcaaggtcctgacacacacacacacacacacacgccccctttaaggatagggatcttctaagctttttccagggatgtaagacttttcacagggagatatgattcccttgcccttggggacagggaccaaaaccaacacccaatgaccagcagctttacttatctcctttctgagtgacaaaggtctgcatttcctatcagtggcctgagacctacctcttgggagacaagggcctgaaccgcttcaggatcttaagcttcttgtaagaagagatgggccctcagcacccccaccaggggcctgaacctttcttcaggaaaatgagactcacagcgttggatcctagggcctaagatccacctgcttatggactgaggtttttagagaccgagtctgaggcctcttcaggggcctggtgtcctgctgcaaaggtctcagacaaggtgaagtctttaggagatccttcttctcaaggctggtgtctgagtggttttggggatctgagactccccaccccacgagcatatgtgacccttttaccccaattataagggactgaaacataccttggggatacagtatcccattttcccctctgtaacaggggtttgaggccctcccaccttgggcctaagctttttgtcagggacatacgacccatgccttgggaacttgagcctgagacgactactcaggggacatgggcaacatgggatcccagagatgatgtctggggcctccctacagatctttgcctacttttaagggcctgagacccactctgccaaggacacttgagctttccttcagggacaggagactcatacataccttggtgacttgtgtgtctagaggtaaggtctgagcttcctcctcaaggaacttaagatgtacacctgagaaacaggaggactcctccccccagacctgagccctgagactcttcccttggggcatggataaaggatccctgtggaacagggtcctgagtctacctccaagggtttgaatcataactcaggtgtgtgaaggcctgttccccaccttaggacctgatttctgaacctgccctgagggtactgtcacctcacctcagacaacttacatacaccctagtcttaggggtcatttagggacataagacttcctgcctcggggacttgggccttagactcccaactccttttggggacatgaatagggtaggattctgaggaaaagagtctgggcccaagctttctctctgggacaagataccgtttgccttagggactgggggcctggctcccacttgggcatgaggctctcctcctaccacaccaggcaatcctttctgtccagggagaggaacgtgaggtcatcctctcccattggacagaaggacctggatgctcttcagggtcatatgaaccccttatccagagctccctcgtggccagggccaagaaggtcctcctactttctatgagaagattgtcaggtcctggggacatggagtctggagcctcccttctgaaaccaagagcgattccgagtctctccctgacctagctatgcttgcttctcacctctaggtcatataataagttttgaactgcttttgacaagcttttttcttcccagggacaggaaaggggtttgggacatcgccactctggggaaattctcctcccacattccttttccccttggctcaggtaaatctttctgtacttcacaggggccccaagccttgtcttgagctccttgttcttggtcccttcctcccatcattaattctggcacgataagccatttgtactcaagggtcaggaccagttatttcttctctctctggttgggtagtttctttcctcctctagaagcagggagccatacatcactggtcctagggacagaggaaaaacatcctatgcagccatgataattcaaaaacacctccttactcccctcccttgcgatacatccctggtcccagggacagagagaaagaacatcctatgctgccatggtaactcaaaaacacttccttatgccccttgcagtccctcccttatacttgtccccataagaacataggagtaagccgggcatagtggcgcatgcctgtagtcccagctactcgggaggctgaggcgggaggatcacttgagccctggagttcaagacctgcttggcaacatagcgagacctcatctttactaataaaaaaaaaagaatatgaaaatcaagttttgtgggttcatgaaacctgcccttcccaatgacaggagaggctttctgtccccacacttcttaggacaaagaaggtgatcctcttctccctgcctcacctggtccaacttgagagcttttggggatgagaagagggaagattcctcctgccaccccagtcttggtcctaaactgtcactgggggtggttgtagcctggaggtcagttggatcccttgggaagagaggcgtcgttgagggggagtctagatggcgattctggggttctgactacttgggcttcctctttgtcctgattctcttgtatccctacttcctttaggagtctttttggcactctggggtccaggtgctgggtgggtggtgatgtcaggggttcccaggcatggctgccttgctgagagtctgctctatgaaaaggttggcctgtaagcatcctgagtttggagaccccacagagctctttgagaaggggcatgtgaactgaggtggtggaaaaagctgggtgtggcacggtagttggtgcctgggttccaactctgggtctttcaaggctttgctggatgaaccagggtaggttctacctatgctctctgggcctcagtttcctcactggccaggcaaaatgctggtgaggtgttgtttagctttgggattttagggaactcagtccaaagttctctggacctggaggtggcaaagaatggtggatgtcttttgaggaggaactgggtttctcccctctcttcctggctcctctgttccctctcagccatccaagcttggtgggcaggacaagcagcctgttttgtgtgaggctcagggttgatgaacagccattttttgtgggcagccatgttgtaatgaacaagctcgatgggatttcctgtcaggaggcctgttggatagtggtgtagagaggtagagttgtgtgtggagtttgggctttggagcaaggcaagctttgagccatcatccctcaattctctcatcacctccagacctcagcatctcctccttacctgctttatagctttaggcaaactacttgccccctcagctgcccattttgcaaaagtttgtccatgcccaggtgtgtctgaccttgctcaccttggaccttggccggttcttcctcttgcccagaatgggcagtttgccccagggtcatcttggttcttcctaggagcctttgtccactcctagtaacctatctttgatagcaaaggcccttcatttggcatctaggaacctgctgatttcttgggctcttcttaccccaactggaattgggtagctagctggtggggaagcaggaaggggtctctgcccaggcaacgtggatttgagtcctgtttctgcagtaagcttttctgtggtcttcaggcagttctcttttctggttcttggtttctccctccatgaaatgggtagtgttgaggagggaggttggactcattgctctgaagcaagttatagtctcctccctgctcccactcccctcacccttcatgaaagttttaagtgggaccccttggcctttggggattgtgctaggacatttcaagcagtgttcagcgtccttggctggtgctgagcccttgggtgtgtttcttttaacaactttaatgagatgtaattcatgtaccatactattcacctctttgaagtgtacagttcagtggcttttagtatattcacagatttgtgcgtccatcacatcactacagtccattttagaacattttcatcaccttaaagagaaatccagcactctttagctatgatcccccaatttcctcatccctttccagcctctggcaaccactaatctactttctggcttgattgatttgtctgttctggatgtttcatgtaaatggaataatagaatatgcagttgtttgttacttggcttttttcacttagcataatatgttcaaggcttatccatgttgtagcatacatcagtgcttcattcctttctattactgaataacaggaccttgggtttttttgttttttggtttttgtttttgtttttgttttttttttaaggcggagtcttgctctgctgcccaggctggagtgcagtggcgcaatctcaggtcgctgcaacctccggcttccgggttcaagtgattctcctgcctcagcctcccaagtagctggggctacaggcatctgccaccacacccggctaatttttgtatatttagtagagatggggtttcaccatgttggcaaagctggtctcctgaactcctgacctcaggtgatctgcctgccttggcctcccaaagtgctgggattacaggtgtgagtcaccgcaccctgccaatcttagaggtttttaatccccctgccctcagtggcctagccaaatgttggggccttgctcttctccccttctgccctggagggcttgtgttggtccttagagagtagtgtgtctatgttcctcgttggatgggttgcctgtgtgtgtttttttttgagatggagtctcactctgtcccccaggctggagtgtagtggcgcgatcttggctcactgcaacctccacctcccaggttcacaccattctcctgcctcagcctcccgagtagctggaactacaggtgcctgccacctcgtctggctaatatttttgtatttttagtagagacagggattcactgtgttagccaggatgatctcgatctcctgacttcgtgatccgcccacctcggcctcccaaagtgctgggattacaggcgtgagccaccacgcctggccccctgtgttttgtccatggagccaggctagtgttcctgggtgctttgctggagggggtggtcttggcaccagggctgctgggacagagctgtgagtcacagaatgctaaacaccttttgaccataggctctgggaagacatctgtccatgaactgccactgctgctgccatcttttgcccccccaccccacccccacttcagtggcagctcatccatccataggcagggtcagtagtttcccagggtgagaagggagattccaggcccctgctgccttaattctaacctcccaccctggaggatggtaggcaggtggaccttgcagagcgggatccatgccatattgtctcacacctgtgaggcactagggaacagacaccaaggagtgctaccaaggggggtgtgttagtttcctgtggctgttgtgacaaatgttaccacagactgggtggtttaaaacaacagaagttggccgggtgcggtggctcacccctgtaatcccagcactttgggaggccgaggcgggtggatcacgaggtcaggagttcaagaccagcctggccaagatagtaaaaccccatctctactaaaaatataaaaattagctgggtgtggtggtgggtgcctgtaatcccagctactcgggaggctgaggcagagaattgcttgaacccaggagacggattggaggttgcagtgaggtgggggttgcagtaagctgagattgcgccactgcactccagcctgggtgacagagcgagactccatctcaaaaaaaaaaaaaaaaaaaaaaagagagagagaagtttattctgtcacaattctggaggccagaagtccacaatcagtttcactgcatccaaatcaaagtgttggcagggccacactccttctggaagctctcagggagaatttagaccttctctagcctctcgtggctgccaacattccttggtttatgactgcatcattctaatctctgcctccatcttcaccatcgccttctctgtatatgtggtttccttttctgtctgtatcaaatttccctctgtctctcttttataaggacacttgtgattgcatttaggtcctacctgatactctaagataaccccccatctccagatttaataatgtaagttaattacatctgcaaacactttttttcttttctcttctctttttttttttttttttgaggtggaatctcactctgtcacccaggcgcagtctcggctcaccgcaacctccgcctcctgggttcaagctattctcctgcctcaccctcctgagtagctgggattgcaggcgcccaccaccacacctggctaatttttgtatttttagtagagatggggttttgccatgttggccaggctggtttcaaactcctgaccttagttgatccacccgcctcggcctcccaaagtgctgggattacaggcatgagccactgtgcccgggcttttcttttcttttcagacagtgctggcctctgtcacccaggctggagtgcagtggcgtaatcttggctcactgcaccctccacttcctggactcaagtgatcctccagcctcagcctcctgagtagctgggaccacaggtgcgagccaccatgcccggttaatttttggtgtttatttatttgtttttgagatggagtctcgctgtgtcacccaggctggagtgcagtggtgctatctcggctcactgcaaccttcgcctcccaggttccagcgattctcctgcctcagcctcctgagtagttgggattacaggcgcctgctaccatgaccagctaatttttgtatttttagtagagatagggtttcaccatgttggccaggctggtctcgaactcctgacctcaggtgatccacccgcctcggcctcccagagtgccgcgattacaggcgtgaatcaccgtacctggcctgtattttttgtagagatgagatttcaccatgttgcccaggctagtcttgaactcttgagctcaaagcgatctgcctgccttagcctcccaaagtgctgggattgcaggcatgagccacgacgcctggccctacctttttcattataaggtaacatttacaagttccaggggggttagggtttgatatctttgcgtggctattaatcagcctactagagaggcttttttccctcctggggaagggaagggaactcattaagtggtctcttactgggcaaagccctgtaatatttgagtctgcccagcatccctattattgggaggcttggtatccccattcacagattggaaaactgtggctcagagcagttcatcatcacatggctaataattggtggagctagattggaacctaagtcagttgggttccacagcctgctccaacttcacttgggcccttagaccactaggttacagaatcttgcctcagctcctgggatcctctggtgttagggagctttactcagcctttttgtggaggctcaaagatatggagggattttcccataggctcagcgatgagtttgcaaggttcacaatctcctcaggccagggcattgttggagcttaaacttatctatggctgagctatcccctaccccccacccctactagcccttcctgagcaacattttctccccaaaaggagaaagagaagggccagagcccaaactcctcaggctgctgatgacaaagccagtgggtggctagcagtccagcctctagatccaagcctggatgccagtttgactgccccaggacccaaaccctgcagtgcgaggggcctattcaggtctctttcatgtttagagacaaaccaggatattctgtggatgggctgcaaggtatgtcctccatgctgtggctcgtgggggccttccctgttgcctctacactaggctttgctggtatccaaactccagctcctttctctttctgcctttgtttttttgttttttgttttgtttttgtttttgtttttgagacatagtcttgctctgttgcccaggctggctggggtgcaatggtgccatctcggctcactgcaacctccacctcccgagttcaagcgattctcctgtctcagcctcccaagtaactgggattacaggcacacgccaccacgccctgctaattttttgtattttcagtagagacaaggcttcgccatgtcggccaggctggtcttaaactcctaacctcagatgatccttccgccttggcctcccaaagtgctgggattacaggcgtgagccaccgtgtctggcctcctttctgcctttgtaaagtgagggtaatgtttcctgccacctgggctgtggtcaggaaaattaaacgaggtcaccctttgcatctggcatggggcaggtattcagttaatatgagttcatctttcttcctggtcctccctgcttacctgcctagtactacccagaactttagctctactgaattcattgctgggctccaggcattcctggtacttcgtggcagaagtgacttcatttctcatccagttaacaagcatttttggaggtcttggtgttttaatcctttggtcaggtggcacctcctctcaggtgctagccttaatgactgtgtttctttttttcttttttttttttttccttgagacagagttttgctcttattgcccaggctggagtgcaatggtgcgatcttggctcaccacaacctccgcctcccgggttcaagcgattctcctgcctcagcctcccgagtagctgggattacaggcatgcaccaccacacctggctaattttgtatttttcagtagagacggggtttctccatgttggtcaggctggtctcaaactcccgacctcaggtgatccgcccacctcagcctcccaaagttctgggattacaggtgtgaaccaccgtgcctggcccaatgactgtgtttcttttcttttcttcttttttttgagacagagtctcactctgtcgcctaggctagaatacagtggtatgatcccggctcactgcaacttctgtctcccaggttcaagcgattcttctccctcagcctcctgatttagctgggattacaggcatgcaccaccatgcccagttaatttttttttgtattttttagtagaaacaaggttttaccatgttggccaggctggtcttgaactcttgatctcaagtgatccacctgcctcggcctcccaaagtgctgggattacaggcgagagccacttcgcccagcctctttctgtttcacaacacctggcatttacatttttcacagccttgttcataccttgtggtggttacctgtttccctacccctctgctaagtagtttgtgagcttatcaagagtggagactaagtctgattcatttcactgtcctcactgcccagcccagtatcttacttagtagctacctggtaagtctttcttgaatggataagtaggagcccctctcctgtttgatctccttttctcctctctttttcccctctctccaaagccaggaagtcgctgtgttcccttctttttaagaacctattcttgtgtcaggtttgggactatagttgtggttgcaccatccctgctggagacccctggctggggcaggcccatgactctgggagatggctgaccatgtgtggccaggatggacttgggcataactggctggagtgtgttaatccacaggcttgggggcaaggagggacacctggactactggaatgttgtgcacaaacaggagtccttgtgctgcgcatggaagctcattaagggcttccaggtgtctttgtcatctctagaaatccagccacattttcctggggtgtgggccctgatgatgggactggctgggtattcccttgtcacctcttcctcccctcctgtcccgctactcacctaggactttctgagggtctctcagttgtgcataatctctgtgctgatctcctccccttctgtgattggcgacaacttcccctagtatatggtacgttatttacaaagcttctttaggtcctgaaactcctcacagctctgtccggtagatcaacatatcccccattctataggaaactgagagtgataacagacagcaagtgtgtggcaaagctggggttggaacccagagctcttgcgttccaaaccttgtgcttacaactttgccagagatgcttctcctctggctttcttaggggatgggttccaccccttgcttgagctggggaaaaatggccttacggataggtgggcccctatgtctggtctctaataccccagatcctataaatccctgggcaggcctgtgtccacaaggagcaggcttgggatcctgtagtttgcagccttgttgctaggtcaggctggctgcttctggtagccagcagagggcgtgaggggcccaggaaaggtctgctgcttctggttggttttgttttgaaatgaaaattatgttttaagaggttatatggtcattatttttttaataaaaaaatatgcatttgtacaggttcatttaagttgaaccttcgtggtgccaggtgtgctttggaatttaggaaaaaaacaatttataaaacttacctggtgtgtatactttgtgttacataacacctccagcagggtctgaggcagcacctcataatcaaacacctgaatgttttctgcattgaaatatttgaatatttaccccaagtgggataaatagattcttgtcagttctggtcaggttatgatgccaaatgaattagataaagacttttgggccgggcacagtggctcatgtctgtaatcccagcactttgggaggccgaggcgggtggatcacgagatcaggagatcgagaccatcctggctaacatggtgaaaccccgtctctactaaaaatacaaaaaattagccaggcatggtggcaggcgcctgtagtcccagctagtcgggaggctgaggcaggagaatggcatgaacccgggaggcagagcttgcagtgagccgagatagtgccactgcactccggcctgggcaaaagagtgagactgcatctcaaaaaaaaaaaaaaaaaaaaagacttgattttcaaagctttttgggtttagtgtaactttataaaagggaaagtgcaataaaatcgctgataacaccaggacttagggatattttgctgtctagccttcccaattttgtgtacgtgtgtttgtatacatacatatgtatatatgtgtagatatctgttaaatgtgttcagtcacagatgagaacattgtttgcacacttttgccttctagagtatatctcttttttttttttttgagacagagtttcgctcttgttgcccaggctggaacgcaatggggtgatcttagctcaccgcaacctcttacctcctgggttcgaacgattctcctgcctaagcctcccatgtagctgggattacaggcatgcaccaccacgcctgactacttttgtatttttattagagacggggtttctccatgttggtcaggctggtctcgaactcccgacctcaggtgatccacccaccttggcctcccaaagtgctgggattacaggtgtgagccaccatgcccggcctacagcatatcttggaatcctctagccctttgtcaggttcaggatctaggctcttgctagttaccccctcttcaccacctttcctagatgaaactccttgaggtagagccacattctccacccaggcacttgctgggtctgagtctctggctgcctgaggcagtgtggctccctgggccaggccctgcaaggtcaacagaagccataaggcatatggggccactgttctcagggcacctaggacccttttggaagtaagtcttagtttcactcagcaactaattccctaaaagagtctcctacttcacatgcatggagtggtcaaacagggctgagaactttaccttggccagcgtcctctctgtcaatgatctaggcctctcgggagcttgaggtcggggccctggggagggagtacaggttttccctgttgctgacccccacctcttccctccagcaggagcattggtttgaaaaggccctacgagacaagaagggcttcatcatcaagcagatgaaggaggatggcgcctgtctcttccgggctgtaggtgagtctctgccttagtccttaagggcctagggctgcccctaagctgtgtcccagttatcaggaatagcccctgagacagggttgaggcagagctagctaatcttttagggactctaggctccagcctcaagttggtatctgacctctagccgtgggtcttgagacattgtagtggtgcaagattaatatgcataataacagcaagaagaatgataaagaaaataatatcctttgggacacattgtcaggtgctacaggaaacctctttgattcccctctaagctaggtgagtgtagggactactgttgcttccatttgtcagatgagaaaagtggctcagagatggtgggtgacttgtctggagtgaaataataagtggtagagttgggattcagtgtctgggttagattagtctgaggcccatgctcttaaccatagcacactgctgccaccctgggctgtatgacccctaggtttatacccagatcccatctctggtgtgttgcgggtctctgttcctcaatctgtgtgtatgggggctatcagactagatctttacaaatttcttatatcatagaattttttttcaacttatataaaagtagagagaatgatgaaccctcatgtacccatcatccagcttcaaaatagtcaatacgtggccagccttgtttcatcactatcccgcccactctttctcactcccctgaaagaagagtatttttaaagcaaaaccccgacattggatcatttcattcataaatatttctgtatgtttctctgacagatacagacttactctcttctttttaacataatcaaaatgccattactgcacctaacagaattaataatgccttaataccatctgttatccagtctgagttagatctttgaggccattttggctctgaatctgtgacccaacaagtagttgtgaggtcctgtgctagggtgaaggggaagctgggaatgtgacctgatcctccctgtggttctctgatatctaccaaggaaaagtgccctctgataggagctttgagctgggagtcagaagacctaccttctagttctggccctgactcataactgctgtgacacttggccttggtcttcccgtctgtgaaatggtgttgattctcaatgcctctttgagttccttcttggtctgctattctctccgtctgtgggtaccccccatgtctactggtgggctggggtgttttaggctccatccctggctgcacaactgattcttggtatgaccttaggcaagcagctcttctttcctgaggctgtttcctcatctgtaaaatggggctaaaagaccctaatgctgtaacgatttaatgaagttgctttggtaaatccctttagtgcctgacacatatagtagaccctcatggaacagtagcatttgtaaaacccagatgccattttcactggtgcctcagagtcacatgtgtttgttgaaagggtggagtgaatggtctcctctctattctgccaagcagaagaggctcaggcaatgggctctattggactgggaaaaaacttatccctcctacccctctggctcaagtttgtgttttccctgggatgtttcccagaggaagagctgggtttcggggcatcttggacaaaagaaaggcaaagaaagaataggtgggggcctgttaggtgctaggccctgtgttgagacctcaggctagatgtggggtaagcagggcttctggtggagttaggattagagaatgcagcgggcatctgagtcttgggcagtcattgagggtaagccttgggactggctagtgaggacctggcttgtgtagtaactcatatcaagagccgtgtgtgtgtgtgtgtgtgtgtgtgtgtgtgtgtgtgtatctagctagctgttctctgtgtgtgtgtgtgtgtgtgtgtgtgtgtgtgtgtgtgtgtgtgtgtgtgtgtatgtgtgtgtgtatctagctagctgttctccccaaatacccccgacccttggggctagctagtgaggacctggcttgttgtagtaactcgtatcaagagcagtatttgtgtgtgtgtgtgtgtctatatgtatctagctgttctccccaaatactcccgacccttcctcccactggggccttcggtaaggggcctctacttacaggaagagctgaccagggcaggttgaaggcctttccttatcggcactatggctacacatttcccctgactgggctgcctttggcttttctctgtaaaacctcagaagtcctctggcctctcccccgaagtacatggcccttggtctctagaccttatctggaggtttccttggtgcagagtgcataatacatgtgcctgggaaggggactttgtccctgggctttttgctgcccccgtttccagcctcgcctggatggggacagatggcagtcagcttagactgtagtgtgaagccctacaggctgacttcctgccatgtgttgaatagtggaaggaacgtggagcagagagttggagttgggcgggggctgcaaacatagagggcactgtttccttgacccctgctgtgtgctaggcattcagctgggtgcttcaggctcactgcaaaacttggatcattatcccatgagacaggtgaaaagattgaagcatagaaagggaaatgacatgctcagggccattagccagagctggcctgggaacccagaggtgtccaaaggacacgcattcttttttttttttttttttttttttgagatggagtctccctctgtcgcccaggctggaatgtgcagtggcgtgatctcggctcactgcaacctctgcctcccgggttcaagtgattcttctgcctcagcctcctgagtagctaggattacaggcgtgcaccaccacacctggttaatttttgtgtttttagcagagatggggtttcaccatgttggtcaggctggtctcaaactcctgactttgtgatccacccgctttggcctcccaaagtgttgggattataggcatgagccaccgcatccggccaggacacattctttttatgatcctaggatccttagcttcttagcttggttgtcaactggctggatgaccttggctgtgttccttgacttctctggaccttacctcctccaagtaggagcacgtggccctctgttgttgggagtcttgaggcaggtggctttctgccttctgttcccctggattatcttcctatagggtcctaccatttgctttagagacttctgagaattgcctactccccaggtagctgcctgcctgccattggttcccctgagttaagcaatatccattgcttgcgctcagttctctcccacctcctcttattggggattcatgagcatcattgaaggcttgggtggagtggaggtgggaacctgagcctcagaggtatcctgtggcccaccctgtccctgttatgctcagataacctcctcctggaaacatgactctgcatctctcccttgctccctccctccatgtggctttgactcagcagaaacctctaaccctgaccagggtcctggtgctagcttctgtgggcagagtgaaggccacatggttgtttctacatgggccatgggggagtggcaagggctgtgcatgttaccacgatgaggcccagaaacattagctaggcccactcttctgggccttttggtcttggaacatcagcactaggagggatggatctgagatcaattttgattgttttataaatggggaaactgaggcctcaagagaaagccaagaccctaccctatctaggtcatacaaccagtgtcagaacattggtatttgaggttgaaccaggccacagaaagaagattcccacgggccatttcctgtacaccagcttccttcagcctctcccgtgtatccttcaggtttctcatccttgcagtgggaatccttgagcagaggagcacacatctcaggaaccagactatccagtgggatgagttctgtctctcccactgagggtatgctagttggggtagttggggctacagaccaggtcacaccacagctgcttgacaggcaagtgagacctttgtcctggctcatctcctcaggagattggttctcagtggggccagggttcccactggaccaggagggtagtggggagcagaccaggtccctgtctccctctgcagctgtgtgtacacacgttagtgtggtttgtttttaggttccctgtagacacctagcttccttttttgcccttagcggaacttgctgtggctcttctgggaggcaggcagctacctggggagtaggcagttctcagatgtctctaaagcaaatggtaggaccctataggaagataatccaggctctcatgtcttgcttcttaacataaatctgggtacattattggttacattacattagttacataaggacttcccccgggcaacagaggagagaggttgaggctagtctgttagagctcttggttatttcccctgccctccacctaccctgccagaggccaggaaggaggttggtggggtagggggtccctcagtttatagagcctcacatcttcagtctttcctgaagtggcaagggcatctactcattgaatgtgatagttctctgttgtgggatttgttgggtgagcatttggcctcagggagcatctttggcagtctctgctgtatgtgtatacacatgtgcatttctatactggtgtctctgtgtgtccagaaaaaggaaagaagtggggtgtgtatggggagggtaaggttcatattggcctctgtggccctagggagagatgcagcccctgatatctataatctctgccctctcccatgcctttcctgggttctagctgattcctgcttgtgctggtgtggaaactgaggcacacaagatcaggtcctgccccagggagtaaggtgactaagatggtggctggattggggtgaaggtggtaatatcagctggggccagcagttaccctttgagagcctggcctccccttcactccccctaaatctgtgatcccaggcaagctttgccacatttctgtgtctcctgggtaaagtaagagtgttttggtaaggatagaatgagttggagtgtgaaaagtctttggtgtgggaccaattgtagtattgtactgaggatttctgagccctgtttgagatgggaacagaggtagaatggtgggggacccccttccagctggcctctgggaggggagaacaggtgcagattgcccacaagtgcagcgtcagcaagaggaggagtttcagtttctatcaaaacaagttctctgaattcccctacctctgcaggtcatccccccaacctcagacccctccacagggaagtcaagcctggcccccagccctgtgtgccagccttctgggaagaggagggctttctggaggacagaggtggagctaggaaagtcagaaaaacgaattcttttttttttttttgagacagagtttcgctcttgttgcctaggctgtagtgcagtggtgtgatcttggctcattgcaacctccacctcccgggttcaagcgatttttctgcctcagcctcccaaatagctgggattacaggcatccaccaccccgcctggctaattttttgtatttttagtagagatagggtttcaccatgttggctcggctggtcttgaactcctgacctcaggtgatccacctgcgtcggcctcccaaattgctgggattacaggcgtgagccaccacacctggccaaaaatgaattcttgttgagtacttcctatgtgtttagctctgtgcttagatgcttttcctgccttatattattggagaaatccttctattctcccttgttgggatagtactattgctgttttccttggtttggagatgtatattttcttccacgttaatgattccaaacttagggtataccttataatcagtgtggtgtgtttcccccctcaaaagctgtgattaggtacatgttataccatatcacctatcagtgccatcataggattgaggagagaaggtggtattttacattttacagataagtaaagaagtgtcataactcgtccatactttaggaccctgttttatgaagcctgtattgttaattcgatattaatttaactgctgaagttttgttagaactaacggcctagaggtagacttgtggacctttggtttcgctaaaggtagagagccaggagaggacatgcatcctaggtctgcatttggggctttcctctggctgaggaattgcaacagaaatgaggaagggcttcataagtggttatggcaacattctggctgactcgtgggtaactagcatatgaaggaatcattgtcgtcatgacaaattgtgttcctgtttcttgaccacctactgtgccttaggtgcttggcaaacctcctgtgtagttttgacaacacccagcagatggaagaggagttactgtctccaccttatgcatgaggacatttcagcttagagaggttaaaggccttatccattgctacacagctaggaggcagcagagcctttctgccaggcaaaggggtcagtggcagagaaatgggaccctcagggggttttcccccagatcccttccctgttccacagtctcctctctttccccattttcctgcatctggcatctagctcttgaagatagaactcccaggcctggaaatgaccgttgacctttccataggagatgggctttctccagcacctcagcctatctctctgagcctggccagccaacccctatttaaccccttcattctcatctttgttcctgtttactgcagctgccaacagcactgcctcccagtaccccaagctcagtctacagaaatagctccccaagtagctcactgtgcgggctctgtggtcctggcttctaagaaaggcagcagcagggggcccccagcctgtgcgcaggacatgtgacttgctggaaatgccgctggggagggcgggggagagtgtggccgcagaacccacatccttgtttacattggtgaaggggctaccccccttcccgccttcacaacctccacacccccttacccttcaggtctcttcacctccaagaggactggagacaaacatgggccctattttctatctcagagtagcctttctcacagaacactccagggtaggaaggggaaggcagggaaggtgttcttctgacagttcttcagagaggtagactgacagggaagaactcaggagtgttcctgtgtgacctgaccctagccccatgccccagggagatcccatcagagcagtggtcctctggggaaacaaagggaaattcccaaaaccagtggaaatcagacttgcatgatcttcaggcccactttaatttcacagggagaagagctccctggcttacccagcctatccatttgctcagtaaacttttcctgatttcctttactgtatcgggccctgagctgggggtggactttggtgtgaactgccctttgccttctgtgggagcccagtgtggtcgggcagaagtctatgcacacctttgataaatctggtgatagaggtgtcctgggtagtggggaactgtattaaagaacatgttgggccaggcgcggtggctcacacctgtaatccaggcactttgggagtctgaggcgagaggatcgcttgagcccaggaggtcaaggctgcagtgaactatgatcgcgccactgcactccagcctgggcgacagagcgagaccttgtctcaaataaataaataaataaagaacacattggtgtttgagaagtaggcagctgacgaggatggaaggagcgtcctgaagagaaggaacggcatgtgtgaagatcctcaagcgaagcagagggagtgtgtttccttctcgccttagtttgaccaaatctcacgacgcctggactattcgggccacaggctgcccatcctgagttaagctaaagttagttgcatgtgtgtcttatctcttttactagactgtgtgctccccgaaggtaggggcaggattttactcacctctgtcaccttcacagtaccccacattcaggcctccctacggaggaaggaattctgatttactctgtggctactctgtcccaagcccagtggtagttattttatacccgttatctcatttaatccccacaaaaggcctgccatttggttatccctttttttttttttttttttttgagacagagtcttactctgtcgcccaggctggagtgcagtggcatgatctcggctcactgcaacctctgcctcctgggttcaagcgattctcctgcttcagcctcccaagtagctgggattataggcgcccgccaccatgcccggctaatttttgtatttttggtagagacggggttttaccacgttggccaggctggtctcgaactcgtgacctcaagtgatctgcccaccttggcctcccaaagtgctgggataacaggtgtgagcctccacgcctggcctgttatccctctttttcccattttacagatgaggtatatgaggctcagaacacttgggtcacttgcctctggtcactcaactctctagtatctggcagaactgggcttggagcccatttttttttctttcctttttttgtctttgttcccttttttttcagcctacaaaggccatgttgacttgtaggagtcaggaaaactgaattcagagttgactctgtcacagactgactctttgtgaccttggacaaaccacaaactccccctgaacctcagtttcctcatgtggaaagcaaagggggtgtgggaatcaatagcatttgaggccaacctgtggaacttagaatgttgttgatttctctgagtggccacgtgtaccctagacaaagtcatctgcccaagaggcctgtggatgtgttcctctcacctgcactctcttgttcttcaagtctggccctgcctgccatatttttccatgaccccgttctagcctacaagggcaagaactctccaggccttggggtagaaaagggaatttccctggtcccccagttcctcctccccaaaggatgttctatgattcagagctcttctctggcatctctgaccctagctgctgctttcttctgcccccacagctgaccaggtgtatggagaccaggacatgcatgaggttgtgcgaaagcattgcatggactatctggtgagaaaatggaggcctttggggaaggggcagggtgggaggatttcttctccacacagaccttaaccttccaatctattctgcagatgaagaatgccgactacttctccaactatgtcacagaggactttaccacctacattaacaggaagcggaaaaacaattgccatggcaaccacattgagatgcaggccatggcagagatgtacaaccgtcctgtggaggtgtaccagtacagcacaggtacttctgcagtgggtaggtgagggaaagatggtgcctcattcgagcctgcccaacctggcctgctgtggatgctccctccttctctttctctgcagaacccatcaacacattccatgggatacatcaaaacgaggacgaacccattcgtgttagctaccatcggaatatccactataattcagtggtgaatcctaacaaggccaccattggtgtggggctgggcctgccatcattcaaaccaggggtgagtgggtccctgtgcccagaatggctgctggatatagaggtcagaaacctctgttggagtctgttttgcccctaactcacaaaaatatcctgtctcctctctcccctgaggtctcacccttacaaaaaaaaaaaaaaaaatagggagttacttaaggtgatctctcagggcttgttctttggtcttggtttgcctgtctgagttggcttacctatcttttgtgcccgttgagggctggcattttaggatgtggagtcctattttggagcagtgagccagggcttgctctgggcatcttggcatggatctttctcctgggatcatagtggttacagacagccatggtcacagagacatggggtacaggcctggccccaccactcactggctgtgtgatctaggcagattctgtaagtattccaggctggcagcttggctgatacagaaagcacctcccactgggcctggggcctagtaggtgttcagaaggtggcagtgcattttcccagcacataccgatagattctcattcatttctctctctctctcttacagtcatttgctgaggattttggtatcttctattcaggtttcacttctacaaacacaaagtactcctgcttcattttcggaaacacatagcctaacaccaacacaccctccaacatagggttcttttttgttttgtttttaaataaacttaattttagagcaggtttagatttacagaattactgcaaagaggctgggcacggtggcccacacctgtaatcccagcattttgggaagccgaggctggcagatcacctgaggtcaggggttcaagaccagcctggctaacatggtgaaaccctgtctctactaaaaatacaaaaattagctgggtgtggcagtgggtgcctgtaatcccaactactcttgggaggctgaggcaggagaatcacttgaaactgggaggcagaggttgcagtgagccaagattgtgccactgcactccagcttgggcgacagaatgagactctgtctcaaaaaaaaaaaaaaaagttacaaatatattacagagttcccatatgcctcgctatgattaatgtattaacatagtacatttgtcatagttaatgagccaatatcgacatattattaactaaagaccatacttgactcaaattaccttagtttttccctaatgacctttatctgttccaggatcccatccagggtgccatattatatttagttgttgtgtcccctttatctcctcttggctgtgacagtttctcagaattttcttgttttttgtattcgatctgtttactgactctcgttttgccttttctagaatgtcatataattggaaatgtacagtatgtagctttttcagactggcttttttcacttaacactatgcatttaagattcatctgtgacttgtcctggtttaatggctcattttcttttttggtgggcgggtggagagacagggtctcactctctcacccaggctggagtgcagtggggcaatctaggctcactgtagctagcctccacttccctggctcaagcaagcctctcacctcagcctcccgagtagctgggagactacaggtgctcgccaccatgcccggccagtgttttaaaaaaactttttgtaaaaaaatgaaaaaaaattttttttttttgtagagacaaggtctcactatattgccgaggctgaccttgaactcttgggctcaagtgatccttgtgcctcggcctcccaaagtgctggaattacaggcatgagccactgcacccagcttcctctttttctttcttcaaaaatatgaatgttctggccaggtgcggtggctcacgcctgtaatcccaacactgggaggctgagatgggaggatctcctgaggtcaggagttcgagaccagcctggccaacatgatgaaaccctgtttctactaaaaatacaaaaaaaaattagccgggtgtggtggcacacacctgtaatccgagctacttgggaggccgaggcaggagaatcacttgaacctaggaggcagaggttgcagtgagctgagatttgacccctgcactgcagcctgggtgacggagcgagactctgtctgaaagaaaaaataaaaatgaatgttttaagtttttgtatttaatagacttaattgtttagagcagttttagatttacagaacaattgaggagataatacagaattcccacatatccttctcttcccaaacacagttctgctattattattattattattattattattattattattatcatcttttttttgagacgaagtttctctctcatcacccaggctggagtgcaatggcgcaatcttggctcactgcaacctctgcctcccgggttcaagcaattctcttgcctcagcctcccgagtagctgggattacaggcacccgccaccacgcccagctaatttttgtgtttttagtagagacggggtttcaccatgtcaaaggctggtctcgaactcctgacctcaggtgatccacccatctcggcctcccaaaatgctgggattacaggcgtgagccaacgcgcccagcccagttctgctgttattaacagttcaaatcattatggtacatttgttacaatgtgcgaaccaacattaatactttttttttttttttttttaaggcagagtttctctctgttacccaggctggagtgcaatgaggcgatctcggctcactgcagcctccgccttctgggttcaagcgatttttctgcctcagcctcccaagtagctgggattacaggtgcccaccaccacacctggctaatttttctatttttagtagagacggggtttcaccatgttggccacgctggtctcaaactcctgacctcaggtgatccacccgcctcggcctcccaaagtgctgggattacaggcgtgagccaccatgcccagcctaatacgttactattaaatgaaatctgcatgcctccttaggcccctttatctttgatagtttctcagttttgttttgatgaccttgacagttttaaggagtactgatcaaatattttgtaggaaatgtctcttttggactttttctcatgtttaaactagggttgtgggtcttagggaggaagatcacagaggtaaagtgccattgtcattacatcatttcaagggtttatactatgagtgtcatttatgcctgttggtgttacccttgatcaactggcagaagtagtgtttgttaggtttctccacctaaggttactctttcccaccttttccatactgtactgtgtggaaggaagtcactatgtgcagcccacgcctaagaaatggttatgccccatccccttgagggtagagtatctacatagattatttggaaatctttaaggaggatctgtgtctcatccttaactcatccttaatttattaatttttccagttattacgtacatcaatatggtcttttttttttttttgagagggagtttcgctcttgttgcccaggctggagtgtaagggcgccatctcagctcactgcaacctctgcctcccaggttcaagcgattctcctgcctcagcctcccgagtagctgggattacaggcatgcgccaccacacccagctgttttttgtattgtttagtagagatggggtttcaccatgttgggcaggctgaagtctcgaactcctgacctcaggtgatccaccctcctcggtctcccaaagtgcagggattacaggtgtgagctactgcgcccagctcaatcagccatttctttagagagccctggcatgtattggagactgttaacagaaatcaagacctaggtgttgaatgtgctcttcgatatcaggttgtccatgcttctaggccctgtcagctgatagagcaaggagctacatgtatgtatagtggcctttgtacacatatctataaatatttctacctgtaaccatctgtatttatattaaacatgaatccttactgatgtctccaactcagatccattatcacatgcttcattctagccttctccccttgttcatctgcaaattccctctccaacagtagatacgccatcagatgtatatgcactggttcctaccatccatttatgtaactgctcatttccatatacacgcgtagcagaatcacacttgttcacccgtacccccgtgggaaacaactttatcactatagctcaatgctacatatagttcttttttgcctttggtgttacagactccattcattttgaaagtgacctacttgtacccccacccccttcaaatgagggtgtttatttttattttattttattattattattttttgagacagagtctcgctctgtcgcccaggctggagtgcagtggcgtgatctcggctcacagcaagctccacctcccaggttcacaccattctcctgcctcagcctcccgagaagctggtactacaggtgcctgccaccacacctggctaattttttgtatttttagtaagagacggggtttcaccgtcttagccaggatggtctcaatctcctgacctcgtgatccgcccgcctcggcctcccaaagtgctgggattacaggcgtgagccaccgcgcccggccaaggttgtttcatgtttgtaatacatttgtattattttgtcacatttttgcattctatgctgggatctcagatctcctaattttttatttatttatttttgagacagagtctcactgtcgcccaggctggagtgcagtggtgcgatgatctcaactcaccgcagcctctacctcctgggttcaagcaattctcgtgcctcagcctcccgagtagctggaattacaggcatgcactaccacacctggctaatttttgtatttttagtagagacggggtttcatcatgttgcccaggctggtctcgaactcctgacttcaggtgatctgcctgcctcggcctcccaaagtgctgggattacaggcatgagccaccgcgctggccatagatctcctaatttttattttattttattttatttatttatttattttttgagacagagtcttgctctgtcacccaggctggagtacagtggtgcgatctcggctcactgcaacctcagcctccgtggttcaagtgattctcttgcctctgcctcccgagtagctgggattacaggcacgcgccaccacgcccagctaatttttttgatttttagtagagacaggtttcaccatattggccaggctggtctggaactcctgacctcaggagatccacccaccttggcctcccaaagtgctggaattacaggcatgagccaccgtgcccagccttcctaatttttttttaaatagcatatattaaggtccactctttgtgttgtacattctatgggttttgacaaatgtgtaatgtcatgtatctactattacagtattattcagaatagtttgaccacccttaaaattcctcatactccatatgcttacccctcccttcctccctcttcctgcaaacactattgtctttgtgggttgcctttttcagaatgtcatataattgtaatcatacagtatgtagccttttcatactgtttttttttttttttttttgagacagtgtatcactgttgcccaggctggagtgcagtggcacaatatcactgcagcctttacctcctgggtttaagcaatcctcccacctcagcctcccaagtagctgggaccacaggcacacaccaccatgcctggctaactttaaaaatatttttattttgtagagacaggatctcactgtgttgctcaggccaatctcaaattcctggggacaagtgatcctcccgccttggcctctcaaagtgctggtattgcaggggtgagccacctgcagccaatttgcttttttcccccctgaaattaaaatggtcaatgtgacagactgcttcttttcacttagcagtatgcattaaggtttctccatgttctttcatggcttgttagctggtttctttcttatcacttaatgttccttttatggaggtaccagtttaattattcacctattaaaagacattcttggttgcttccagtttttgatgattatgaataaagcttctgtaatgtgcatgcaggtttttttgtggacgtaattttttagatcagttgtatacatacctgggagcaagattgctggattgcgttgtaagattatgttttgatttatgaggaactgagaaactgtcttcccaagtggctgtattatttgcatgcccaccataatgatttggaagttcctgttgtcagcattaccagcaattgatactgtcattgtgttggattttagccattctcttaggtgtgtagtggtatctcattattttaacttgcagttgcctattggcaaatgctgttgagcatcttttcatatgcttatttgccatctgtatagcttctttggtgaattgtgtttgtgacttcctgacatacaattcctaaaatccttagaatctgcaaagtgttgcctttttgtatgctaatgaggtgactgatggctggcagcctctaggtagcttcaggatgggggctggtgacctgaaagaccaaggcaggattagaggtttgcaactttaagcccatcccccagcctttggggaggggagagaggctgaagattaggttgatcactagtgtccaatggcataatcaataatgcctgcataatgaagcttccaaagaatcccaaaaggattgggttctgggagcttttgggtagctgaatacatggaagtttctagagggtggcaccccagggagggcatggaagctccacgtcccttcccccatatctcactctgtgcatctcatctgtatcctttgtaattttctctataataaactggcagacgtgtttcctgggttttgtgagctgctctagcaagttagttgaacccccaaaaaagtattgtgggaatcccaatttatagctggtcagtcagaaattctggaggcccagactttcgactggtgttcgaagggggttggggggagtcttgtgggactgagccctcaacctgtgggatcccaggctgtctctgggtattgaattgcattggaggatggacaccaggtgtccgctgcttgctgtgtgggaaaacaccctccccccagcccgcacacttggtcacagaagtctcctgtgttgattgttgttgagtgagagtagaaaaaacacttggagtgtgtttaacactgccagagtggttagattttttgactatttttttaattggcttgttctaacatagttttacgaattgtttttaactattcacagtaaaaaattacattttatctgaatgcaaggtctgcaggaaaaagaaaagaatacattttacatgattacttagcatatatgcatttgtgtgtgatgtgtatatgtgcattaaaataatgttaactaaagcttcatgaaacaacatttgcacttattccctgggatatattctgatattttctattttttaaaaatgctgttggatctcagcctgaaaaacagtactctgatgtagtgtcctgtaactcatagcaccccacaccatgttgatactgcccccttattccctcacacacccactacttcccccaacccctcacatgcttgaatactccctccacccggtgcacacatagctaatttttgtatgtgtctcatctgctcatgtgtgtgaaagtcctcaacattatgaaacagtcatcactggatggggcttctttaaattaaggcccagggccaggtgcagtggctcacacctataatcccagcactttgggaggccgagtcgggtggatcacctgaggtcaggagttcaaggccagcctggccaacatggtgaaaccccatttctactaaaaatacaaaaaagttagccgggggtggtggcactcacctgtaatcccagctacttgggaggctgaggctggagaatcccttgaacctgggaggcggaggttgcagtgagccgagattaccccactgcactccagcctgggcgacagagcgatacttcgtctcagaaaaaaaaaaaaaataagtcccaggttggaaggcacctgactgctccagtctcagtgcctcagttgaggtggtttgggggttagagtcaggtcttacaagcataggagtttggaatgacaggtcccacatcccaagcctgctttcccctggtccccaatcaagaggtagtctgtggagtgttgctctttgggagtacctgctttcctgtctccttttttttctggggcctgtgggcctacctcgctgagcctgttctggctcttgggcaggttcagtgtgttattgcacatccctgttcctctccctccttgcagtttgcagagcagtctctgatgaagaatgccataaaaacatcggaggagtcatggattgaacagcagatgctagaagacaagaaacgggccacagactgggaggccacaaatgaagccatcgaggagcaggtggctcgggaatcctacctgcagtggttgcgggatcaggagaaacaggctcgccaggtccgaggccccagccaggtgggtcatggactctgtcacaggcttggccaaaaactcattacttctcatgctttgccctcaagcgagcagaaaaaaattaagcagttttgacatctgggagggaaggaagcatccagcaccatctgtaactcatcttggtcttagttttggcattgtaccttggaactttaaatacttgtgcagaacaggcacttaaggagtgagaggagggcagccatgctgctggtgacacgagaataatggatagcttcagagacacaagcttttgttgactgcccttgtgtgccaggtctctactgagaatgtaacatcagatctggactactctgccctcaacgatctcgtctgttggcagagacaactcaatggtggggtccttgaccctgactgggagatcagtggaggtgggggctccggttagtcttcacagaggaaggttgaattgttaggggagcggggaggggcggggcagacaagcatctgaggaattgtaaaatcgcaaggagtttggagtgattgtagatgttggctggcaggagctgagttttttttttttttttttttggagacagagtcttgctctgtcgcccaggctggagtgcagtggcgcagtctcggctcactgcaagctccgcctcccaggttgatgccattctcctgcctcagcctgcggagtaactaggactacaggcgcccaccaccacgcctggctaattttttgtatttttagtagagacggggtttcaccgtgttagccaggatggtctccatctcctgacctcgtgatccgaccacctcggcctcccaaagtgctgggattacaggcgtgagccaccgcacccggctgaaggagctgagttttattccacaaatacctactaccagtctgtggcaggccctgttttcagtatatggggatacataggtgagcccagcagaccaagatccccgtccttgtgatgttcacagttttgcagagtgaaataaaataataaatataatgaataaattagttgggaagtgctatggatggaaagtgtagagccaggataaaggggctgagcaggaatgtgcgttcacggtatgaaatagcgcagtcagggtaggcctcagagcaggtgagatttgagccttgcagaaggtgagagttagctgagcgcacatggaggggaggacagcaggcccacacacctggtacaactcaggcacagcccagagggaggccggtgtatccgaacagaatgtagtagtagatgaagtcagagaggttgtgggtccaattgggtaggggcttgtgggctgtggcgaggactttggcatttactctcagagaggcagaaaccatgggaggattgtgagcagaggacggacaggatgtggttggggatttaataagatcgccttgcctgctagtcatccagtggagtctggtgagtgagggcagaagcaggggccagtgaggaggaggctactgcagtaggccaggtgactggtggccagtgctggcagtggagttggtgagaaggggttggatttgagatctattttcaagatagaggtaacagggtttcctgtcagattggctgtaggggtgtgagagaaagggtaaggagctccacctctgtcctgtgaggagtcttgtggtccaccgtgtgagtggggatgatgttgacctacatagaagctgtatcatagccaaggtcctgggaagggagccagcattcagggatgggtcacaagaaggtcatggctgctggtggtccttaacgcatttaccttccccgctgcagccccggaaagccagcgccacatgcagttcggccacagcagcagcctccagtggcctggaggagtggactagccggtccccgcggcagcggagttcagcctcgtcacctgagcaccctgagctgcatgctgaattgggcatgaagcccccttccccaggcactgttttagctcttgccaaacctccttcgccctgtgcgccaggtcagtgacttgcccacagggaatgtgctgggagttaggaggcacgtcctgggtcctgggtcctggatcctgggtccctacctttgactgtccgtctgcttcaggtacaagcagtcagttctcggcaggggccgaccgggcaacttccccccttgtgtccctctaccctgctttggagtgccgggccctcattcagcagatgtccccctctgcctttggtaagcctcctttgtctggggggatggaggctgctaggagctgggagagactggaagaagtggcaagtcctgagaggggctttctggagcctctggccatctccccaagaaaagaagggagaggcactggaggggatttttcagatccaaggaatttgccccagaagggtctggggtctaagtggggtttcacaggcctagcagatccttctgttttgagaaaggagtgagaagggccctatgggatttctccagagccccagatgtcggcacagggtgaggagaaggcaggctgagagcgctccatcatccttttcctcttcctctcgcccagcaggtctgaatgactgggatgatgatgagatcctagcttcggtgctggcagtgtcccaacaggaatacctagacagtatgaagaaaaacaaagtgcacagagacccgcccccagacaagagttgatggagacccagggattggacaccatctcccaaccccagtactcctgctctccggtgccacctcaccttctttggcttcttccctcttgcctccttctgttctttctgctctcccctcttttccctcctcctcacttccctctggctagcccacccctgcactctctctcattgccgctgccactatcacctgtctctctgccagctgatgtgccctgttgccccccaccccatcccgcacagaaccatccctgcattccacaggggactcgggcaagggtgccgaagatagacaagaggcacacagagacagaccaactggcagccaggcagccccagaggagagagacattcagacagaggaaagtctccctgcccctcattccttccaagatgagaaaaacttgccgccaccccccgacactgatgccagggaggtgggaggaagaagtgggaaatttcccttcccagtacccccaagaacgtctgagccttcaatgttgaattttttctttattaaaattacttttatcttataaaatcaactaatcaaaaatgatatagacgacagcactggctctgtgaaggtggcatctttctgggcaggcaggccatggggcatggaggagggtgcaaagatatgggttgctgtcttctggcctccagctgcatggaggccggcccagggtctagggtgtgcactgggcaagggcagggcggcaggtgtcaggccggcttggacaatgaaaccctgaccttgctgcattccttttgcttccaccaccactagcttctttggaatcttggggtgggggtcatctttggggattatggctgccacccgggatttgagtgtagggagtgtgggagcagccttggcagatggggcacccgtgccctgcaggtgttgacaagatccgccatctgtaatgtccttggcacaataaaaccaaatgtcagtttccctgagcgactctgttctgtgtggggcaggggttgggcgggcctctgggcagaggatgcaatggcacggaccttggcttgacctcagaggtgtgaatgctctccagcagggtctgtctgggggcctggagtttgtatttgatttgctgcttattaaacctccttctggacctattgccactggaaaagctgcgtctttgcctgctgaccccacccctgcctaccctatttcctgggggggggggggtgatggtagcagaggactgtgagcttgaacttcctgcctgaattccagcttctccgcctgcctctcaccatgaatgctgctctttccttatcatgatctgatgaagaaaagccttggaaaagtgcaactgatactttgtagcaacatgagtttagtggaagtaaccagaggggcctcacccactaggttttagaaggtgaaggacggctaaacccttttttgttcttgtcccccagtctgacacctctttgcctgtcctccctaggggtaaatccaaggtaaagaaggctggctggcccccaggttttctcaagcagctttttcaccatgccatgataatggagaccctctgacaggatgtgtgtctggttctgcagttgagggcatggctagctgagtggctgtctgcggagtgtgtctggaacccagtggccaagcatctatttgttgtagagttgctttgaaaccttcctggccctggtcaattgcttctctgtttcaagtgtctcatctgtacaagaggtgattaggctgggtgcagtgactcacacctataatcccagcactttggaaggctgaggtgggtgaatcacctgagatcaggagttcgagaccagcctggccaacatggagaaaccccatctctactaaaaatacaaaaattagccgttcatggttgtacgtgcctgtaatcccagctacttgggtggctgaggcatgagaatcgcttgaacccaggaggtggaggttgcagtgagccgagattgcgccaccacactccagcctgggtgacagagcgagactcagtcttaaaaaaaaaaaaaaaaagtgatatctactccctcatgcttctgctgtgatcatctagagggaatatgtatgatcaaagtaacgtactacctgggcacagtgcttggcacattgagagagcacaaatgttagtagtattctttttgtagaagtttctgcaccatttggcccctgccaatctctcgccgctctgtccagtgttcttggcctttgcctgcaatttgccctcccctgtcctgagccaccaaccttctttgtctttcaagacagagggtcacctgctgagaagcccattcacattctcacttctatctaaaaatctccccagtagctgtactacagataaacttcatggcacgggtttgatgcctgacttatctgtacatctctgataccaacatccccatcaaggcctggcaggcttatagcaaaccacccccaataacgttgggtgaacaaaggagagtacatgtgtgcttttttggtgttgtctgtgtgtgtgtgactgtggtgagtccaagtcttcatgtgcagctcacagagtgtccccagttgtgtgtgtgatgaagggcttgtttccaggtgtgtcagatggtgactgagtgtgggactcttatctctgacagtttgtgtctaaatccaagatgcgtgcatgcctgcgtgggtctgtctgtgacagtgcatctgtggtttctgtctgatggggtggatgtccgtttgtgttcctgcaacagattctgggtagctatttctggacagtttgttccattgataaactgcatgtgtcatggtgtatgtatgtctgtgtctgaacaggtctatccatgtctgtttttgtgacactgccacaaaatgtgattctatcacatcagtacatgtctgccttcagagcagtgcatgtgtgtccctggagcatctgtgcatcttcctgtgacagactctgcgtctctcatttctgggacagtacaagtcttgctgtgacagtgcatatctgatggtgacagtgtgtttgtgacaagttctgccagtgtgacgggacatttctgtgtcatcacatggcaaatgtaggtctgcgtgagtgcctttctgtaacagtgtatctctgggtgtcattctaggacataactatttttctgacagtgtgcttgcctgaaagtgtatgtcagtctctggctgcatgtgtatctaggtcgtttctgtgaatgtgtctgacagtatgtgtttgtgtatatcttggcattcatgtgtctttggagtgcatttttcttcctggggtgtggcgccttttctggctgtttttcacaaatttgtgtctgagagttgccacttctctagcagcctctatcatgtctctcagtccttgcctctctcaactccaagagcagccccatgccaccaccactctgggctcacccccatcccccaagaaccaccccctgctgttctagattctagacttgctgactgggcccagggctcagggttaaaagctccaataaacactcaccaggcaatgctgcctttgaccaatgcacacccgtggcgttgatggtaggggttccccctccctggctaccagatatttccagggccctggcctcagctttccagtgaaggccgccagtcgcctggaggactccggtgaaggagtccgacaagcacctttcgagacggagtcttggatagccacaagcgcgaattcttagaagcccggcctggcgctatctctgtgctaatatccaggcagcggcggcaaaccaacttcccaggaaaggatactgcgcagttattttttaagtgtaaatacacacacacaccgccaccactaccaacaacaaccccgcgcaacaaccaaaacaagcgcggtgctgcaaagggattcccagaaccggtttcctcttggtgtgagccccacctcaagccccctcatttacatgcaggccccgcctcctcggaagaaccgagcgtgtatttgcataagggggcccttgaaacgatgagggtggtatgcaaataagaactggctccgattggctgtggtacagcaggtgccgcgtccggattgatcaaagccaggtgggcggggctgtcgcccagggtgactctcccgggaggcgcgtgcccaggctcagtagcattggggctggcgcgcgcggcgaatctcaacgctgcgccgtctgcgggcgcttccgggccaccagtttctctgctttccaccctggcgccccccagccctggctccccagctgcgctgccccgggcgtccacgccctgcgggcttagcgggttcagtgggctcaatctgcgcagcgccacctccatgttgaccaagcctctacaggggcctcccgcgccccccgggacccccacgccgccgccaggtgagtacatcctcccctactgcaaccagacggggtgggctggaatgatgggttgcagcgcggggggagggagtcgtggctgggctcagcacgccgccaccctgacttcctcgcctccgcctgcgtaggaggcaaggatcgggaagcgttcgaggccgagtatcgactcggccccctcctgggtaaggggggctttggcaccgtcttcgcaggacaccgcctcacagatcgactccaggtatccgtcatgagggtcttgggagggtcaggtgcgtgtggcgggggcgggggtcctggccctggaatgctggttgaccgaggagtgagcctgcagagtgtgtagaggaccaggtgtgtgtgtgtgtgtgtccgtgtccgtgtccgaggagtgagcctgcagtgtgtgtagagggccaggtgtgtgtgcgtgcgcgtgtgtgtgtcggtctaggaggttatgggcggggggggggggcagggggcttcagattccggagttccttgaccccggggtccaggctgtgtatgtgtgggaaagcagggacctagatgtgagatttgtgggacttttggaggtaggtgtccagtgtggagtcatgcggaccaggaccctggtacagagttggggtgtcgtagagctaaataggaagattgtgggcctggggtatcaggaaatctagaactcaggacttggagtgatgagtcctgatgcctgagaacggagagcccagggctaaggaaggtgggagagataaacttggttccgaggacctggagggcaggggagacgccctggtacgcgttctgtggggtgctgtggttggggaccagaaagactagagtgctggtagatggaggaatactggaggtaggcagaaggtctagactgggaggggtctggggatcacctgctggcctccttatcacggccttcttctccaggtggccatcaaagtgattccccggaatcgtgtgctgggctggtcccccttggtgagtaccttcggagcccttcctaacctacctactccatcactgatgtattcacctccttgcttttccaggggatgtatgactccctgggccctgtaacagtgagaatactgccagtccatttatactcccttggggtgacatacagttctgattcaccccaattcccctagagccctggattctcccctccaacaaacctttaccatccttcctccaaacactgctgggggactgcccgcagggcgtgctggtggggaacaaggggcagaggtcactggttgccatggtgatggtggctgcttctctcttgccgttataacgctaacggacatcagggcgggtctgggcaagttgtagagttgggagcgccccctggcgggctctaggggaaactgcgcctgcgcagtccatgggacccaaagggagagggtgcgcctgcgcaatatcggtatttttgcatctcggtgagaaaacgtctgctgccgtgcaagtcagcagcctggccaggagagggctctacctcatcccagaaggttgctgctcgaagtgtacctgcgcagggcttggggaggcagtggggggcggattttgtggcccccagcgtttatacttttttttttttggagacacagtctccctctgttgcccaggctggagtgaggtgacgcgatctcggctcactgcaacctccgtctcctgggttcaagtgattctcctgcctcagcctcccaagtagctgggactacaggagcgcacaaccatgcccggctaatttttgtatttttagtagagacagggtttcaccatgttggccaggcgggttttgaactgctgacctcaggtgatccgcctgcctcggccactcaaagtgctgggattacaggcatgagccaccacgcccggctgcatttatgacttttttttttccttgagacggagtttcgctctgctgcctgggctggagtgcagtggcgtgatctcagctcactgcagcctccacctcctgggttcaagcgattctcctgcctcaggctcctgagtagctggaattacaggcacccgctgccatgcccggctaagttttacgtttttagtagagaccgtgtttcaccatgttggccaggctggtctcgaacccctgacctagtgatctgcccgccttgggcctcccaaagtgctgggattacaggcgtgagccaccgcgcccagcctctaattttgtatttttagtagagacggggtttctccatgttggtcaggctggtctcgaactcccgacctcaggtgatctgcccgtctcggcctcccaaagtgctgggattacaggcgtgagccactgcgcagggccacatttaggctttttattggctggttctaggtgcttggtgatgctgacaaaacacatgataacactaagtccttttgtgctaggtcctttgtaataaatcactcagctgtttaacaaattaggtatattgaccacctactatatgacagacataattctagacactcagcaaagtattacataagtattgagagctcattttgtgctaggtccttttttactaattgttttcacctgtttaacaaatatttattcagccctactctgttagcagccactgttctagtgcttcatatacgtccgtgaacaaaacaaaccattacacaataagtgtttattgagtgctaactgcttgtcagagcccatgctattaagtgctgtcatctgtttaacatttattgatcacctgtgtaaggtactattctaatctgggatatgtcagggaacaaaacaaaacacataatggtggtgctgcttctgctgaaagccttcagttgataaccagatttttctttgtatttttgcttgtttgttttgagacagctggagtgcagtggtgtgatcttcactgcaacctctgccttcttggctcaagcgaccctcccacctgagcctcccaagtagctgggactacaggtgcatgccaccaagcctggctaatttttgtgtttgtgccattttgcccaggctgatcttgaactcttgggctcaagcaatccacccacatcagcctcccaaagtgctgggattgcagggatgagccactgtgcctggccgaacttctttcgtttattcaaatgtttattgatctacgacatgcgagatttgtgcaggctctttgctggtttcaccctctcaatcgctgtgtgagtttgtgtctttagggaaagtgaggcccaggaagggaagtgagttgcttagcgacacactgtcaggaaaaggggccctgagttgagcttaggtaaaaagcctcagagctgttgccctgacatctgtcttttttctctccctgcttcccaccccacctgtgcccccagtcagactcagtcacatgcccactcgaagtcgcactgctatggaaagtgggtgcaggtggtgggcaccctggcgtgatccgcctgcttgactggtttgagacacaggagggcttcatgctggtcctcgagcggcctttgcccgcccaggatctctttgactatatcacagagaagggcccactgggtgaaggcccaagccgctgcttctttggccaagtagtggcagccatccagcactgccattcccgtggagttgtccatcgtgacatcaaggatgagaacatcctgatagacctacgccgtggctgtgccaaactcattgattttggttctggtgccctgcttcatgatgaaccctacactgactttgatggtaaggcttctctaaatctccctggagggattgtttttacttgatggccttgtgacctttggcctccagtggtggggtgtcctgtaatccttgacccatactgcattatataagatgatcgattgctaatactggggattctcagccttgccctctgataaagtccatcttttaatggtgtgctaaccttattctgggctcctattctggtgaggggatcctgttaccatcctgagtattctttctctggtaaggggatcctgttacttttcagtgcttttattctgttgaggggactctgttattttagctgctttttatctagtgaggggactctgcttttatcttgagtgctcttaattgtggtgaggccatccttcctggagagtttggggttggagaagggcatcatgagattgagttggtctaacccctggcttgtgtgcagggacaagggtgtacagccccccagagtggatctctcgacaccagtaccatgcactcccggccactgtctggtcactgggcatcctcctctatgacatggtgtgtggggacattccctttgagagggaccaggagattctggaagctgagctccacttcccagcccatgtctccccaggtgaggcctcactgaccccagcccagaagactccatccttctcagggaccagtaccccctactgactgctaatcttccctctctgcttcttggcctacagactgctgtgccctaatccgccggtgcctggcccccaaaccttcttcccgaccctcactggaagagatcctgctggacccctggatgcaaacaccagccgaggatgtacccctcaacccctccaaaggaggccctgcccctttggcctggtccttgctaccctaagcctggcctggcctggcctggcccccaatggtcagaagagccatcccatggccatgtcacagggatagatggacatttgttgacttggttttacaggtcattaccagtcattaaagtccagtattactaaggtaagggattgaggatcaggggttagaagacataaaccaagtctgcccagttcccttcccaatcctacaaaggagccttcctcccagaacctgtggtccctgattctggagggggaacttcttgcttctcattttgctaaggaagtttattttggtgaagttgttcccattctgagccccgggactcttattctgatgatgtgtcaccccacattggcacctcctactaccaccacacaaacttagttcatatgctcttacttgggcaagggtgctttccttccaataccccagtagcttttattttagtaaagggaccctttcccctagcctagggtcccatattgggtcaagctgcttacctgcctcagcccaggattctttattctgggggaggtaatgccctgttgttaccccaaggcttctttttttttttttttttttttgggtgaggggaccctactctgttatcccaagtgctcttattctggtgagaagaaccttacttccataatttgggaaggaatggaagatggacaccaccggacaccaccagacactaggatgggatggatggttttttgggggatgggctaggggaaataaggcttgctgtttgttctcctggggcgctccctccaacttttgcagattcttgcaacctcctcctgagccgggattgtccaattactaaaatgtaaataatcacgtattgtggggaggggagttccaagtgtgccctcctctcttctcctgcctggattatttaaaaagccatgtgtggaaacccactatttaataaaagtaatagaatcagaagcggctggccatttgtaggtgtgaggcttttatggagcatctactgtgcactgagacagactgtccctctgctttgtcctcaggaagccacagtcttatgttgccatcctaaagagctttaaggattcttgaagctgcaccacacacacacaaaaaaatcttgattcccctgcccctgatcttatgcagtgcccagtatgtgcagaagggttctctgttggagatactgtgcatattgaaggtgtttagggcacatccccaatcaagatggctatctcagaagcagaaaaactaccttccctggcaccccaggggaatgaagaagccctttcccctgttgcagaagaaaagccctgtcagggtactggccagggcggggctggggttgggcgctgactggaatctgtccagggtgtagtcacctgttttgctctttatctttagcctcttcccccatctttacccttacatacccatccctctaatttctccttcaacacttgacttacctggcctaccctattccatgttggtttcacttgttccgacctgagttgttccctctcttgccctgcttatttgtctcggttcagtataaactccgccttccgggttccagcggttctcctgcctcagcctccagagtagctgggtacaggtgcataccactaagcccgggtaattttttttttttatttgagacggggttttgtcgttttgcccaggctggaactcctgagctcaggtgatcgcccggctcagcctcccaaagtgctgggattacaggcgtgagccaccgcctctggcccggactcttgccctgcttccaaatgctagctaacctgtgagcctttcgcctgtcccctttgccatcctcagtggtgactcacttgtcttcccttatgtgcgtcaactttcctttgcattttcacttgtttatcctcacctgctctgcttttatctgctagcttaacattcctgactcgcacctgatgccagtacgccctcaccccgaccccgccaggtcaaagtttcttcgtccccagattcccgtgtgctctccagggggcgaggcctcgctggaagacgggaaagcggaatttcagtccaaccatgaagcacctggtagtttctgatacggaaagggcggcgccttatg

SEQ ID NO: 311 - DNA, 2641 bp, Homo sapiens
cagctatgctcccgggagtgttgatgttttccagtcattccggctgacagcgttcaagttggaatcctggaggggaggtgtttttcctgtcgtacgtgggacaggccacgctgtccgtccgcagtaccgacgcctgcaggtcagagcttcggggagaaaagtgaagagcaagacggaaccatgactatactccccaaaaagaagccgccgcctcccgacgccgaccccgccaacgagccgccgccgcccgggccgatgcccccggcgccgcggcgcggcggaggtgtgggcgtgggcggcggcggcacgggcgtgggcggcggcgatcgcgaccgtgactccggcgtcgtgggggcccgtccgcgagcttcgccaccgcctcaaggcccgctaccaggaccgccgggcgctcttcatcgctgggcgctggccgtgccgcctggtgcagtggcgggtccccggccacaacaggcttctccacctccttgcgggggcccaggtggtcccggcggcggtcccggcgacgcgctgggcgcagcggcggcgggtgtgggtgccgcgggcgtggtggtgggtgtgggtggtgccgtaggcgtgggcggctgctgctccgggcctgggcacagcaagcggcgacgtcaagctcccggggttggcgcggttggcgggggcagtcccgagcgtgaggaggtcggcgcaggctacaacagtgaggacgagtatgaggcggctgcagcacgcatcgaggctatggaccctgccactgtcgagcagcaggagcattggtttgaaaaggccctacgagacaagaagggcttcatcatcaagcagatgaaggaggatggcgcctgtctcttccgggctgtagctgaccaggtgtatggagaccaggacatgcatgaggttgtgcgaaagcattgcatggactatctgatgaagaatgccgactacttctccaactatgtcacagaggactttaccacctacattaacaggaagcggaaaaacaattgccatggcaaccacattgagatgcaggccatggcagagatgtacaaccgtcctgtggaggtgtaccagtacagcacagaacccatcaacacattccatgggatacatcaaaacgaggacgaacccattcgtgttagctaccatcggaatatccactataattcagtggtgaatcctaacaaggccaccattggtgtggggctgggcctgccatcattcaaaccagggtttgcagagcagtctctgatgaagaatgccataaaaacatcggaggagtcatggattgaacagcagatgctagaagacaagaaacgggccacagactgggaggccacaaatgaagccatcgaggagcaggtggctcgggaatcctacctgcagtggttgcgggatcaggagaaacaggctcgccaggtccgaggccccagccagccccggaaagccagcgccacatgcagttcggccacagcagcagcctccagtggcctggaggagtggactagccggtccccgcggcagcggagttcagcctcgtcacctgagcaccctgagctgcatgctgaattgggcatgaagcccccttccccaggcactgttttagctcttgccaaacctccttcgccctgtgcgccaggtacaagcagtcagttctcggcaggggccgaccgggcaacttccccccttgtgtccctctaccctgctttggagtgccgggccctcattcagcagatgtccccctctgcctttggtctgaatgactgggatgatgatgagatcctagcttcggtgctggcagtgtcccaacaggaatacctagacagtatgaagaaaaacaaagtgcacagagacccgcccccagacaagagttgatggagacccagggattggacaccatctcccaaccccagggactcgggcaagggtgccgaagatagacaagaggcacacagagacagaccaactggcagccaggcagccccagaggagagagacattcagacagaggaaagtctccctgcccctcattccttccaagatgagaaaaacttgccgccaccccccgacactgatgccagggaggtgggaggaagaagtgggaaatttcccttcccagtacccccaagaacgtctgagccttcaatgttgaattttttctttattaaaattacttttatcttataaaatcaactaatcaaaaatgatatagacgacagcactggctctgtgaaggtggcatctttctgggcaggcaggccatggggcatggaggagggtgcaaagatatgggttgctgtcttctggcctccagctgcatggaggccggcccagggtctagggtgtgcactgggcaagggcagggcggcaggtgtcaggccggcttggacaatgaaaccctgaccttgctgcattccttttgcttccaccaccactagcttctttggaatcttggggtgggggtcatctttggggattatggctgccacccgggatttgagtgtagggagtgtgggagcagccttggcagatggggcacccgtgccctgcaggtgttgacaagatccgccatctgtaatgtccttggcacaataaaaccaaatgtcagtttccctgagcgactctgttctgtgtg

SEQ ID NO: 312 - protein, 556 aa, Homo sapiens
MTILPKKKPPPPDADPANEPPPPGPMPPAPRRGGGVGVGGGGTGVGGGDRDRDSGVVGARPRDPPQGPLPGPPGALHRWAVPPGAVAGPRPQQDPPCGGPGGPGGGPGDALGAAAAGVGAAGVVVGVGGAVGVGGCCSGPGHSKRRRQAPGVGAVGGGSPEREEVGAGYNSEDEYEAAAARIEAMDPATVEQQEHWFEKALRDKKGFIIKQMKEDGACLFRAVADQVYGDQDMHEVVRKHCMDYLMKNADYFSNYVTEDFTTYINRKRKNNCHGNHIEMQAMAEMYNRPVEVYQYSTEPINTFHGIHQNEDEPIRVSYHRNIHYNSVVNPNKATIGVGLGLPSFKPGFAEQSLMKNAIKTSEESWIEQQMLEDKKRATDWEATNEAIEEQVARESYLQWLRDQEKQARQVRGPSQPRKASATCSSATAAASSGLEEWTSRSPRQRSSASSPEHPELHAELGMKPPSPGTVLAKPPSPCAPGTSSQFSAGADRATSPLVSLYPALECRALIQQMSPSAFQDWDDDEILASVLAVSQQEYLDSMKKNKVHRDPPPDKS

SEQ ID NO: 313 - DNA, 2720 bp, Homo sapiens
cagctatgctcccgggagtgttgatgttttccagtcattccggctgacagcgttcaagttggaatcctggaggggaggtgtttttcctgtcgtacgtgggacaggccacgctgtccgtccgcagtaccgacgcctgcaggtcagagcttcggggagaaaagtgaagagcaagacggaaccatgactatactccccaaaaagaagccgccgcctcccgacgccgaccccgccaacgagccgccgccgcccgggccgatgcccccggcgccgcggcgcggcggaggtgtgggcgtgggcggcggcggcacgggcgtgggcggcggcgatcgcgaccgtgactccggcgtcgtgggggcccgtccgcgagcttcgccaccgcctcaaggcccgctaccaggaccgccgggcgctcttcatcgctgggcgctggccgtgccgcctggtgcagtggcgggtccccggccacaacaggcttctccacctccttgcgggggcccaggtggtcccggcggcggtcccggcgacgcgctgggcgcagcggcggcgggtgtgggtgccgcgggcgtggtggtgggtgtgggtggtgccgtaggcgtgggcggctgctgctccgggcctgggcacagcaagcggcgacgtcaagctcccggggttggcgcggttggcgggggcagtcccgagcgtgaggaggtcggcgcaggctacaacagtgaggacgagtatgaggcggctgcagcacgcatcgaggctatggaccctgccactgtcgagcagcaggagcattggtttgaaaaggccctacgagacaagaagggcttcatcatcaagcagatgaaggaggatggcgcctgtctcttccgggctgtagctgaccaggtgtatggagaccaggacatgcatgaggttgtgcgaaagcattgcatggactatctgatgaagaatgccgactacttctccaactatgtcacagaggactttaccacctacattaacaggaagcggaaaaacaattgccatggcaaccacattgagatgcaggccatggcagagatgtacaaccgtcctgtggaggtgtaccagtacagcacagaacccatcaacacattccatgggatacatcaaaacgaggacgaacccattcgtgttagctaccatcggaatatccactataattcagtggtgaatcctaacaaggccaccattggtgtggggctgggcctgccatcattcaaaccagggtttgcagagcagtctctgatgaagaatgccataaaaacatcggaggagtcatggattgaacagcagatgctagaagacaagaaacgggccacagactgggaggccacaaatgaagccatcgaggagcaggtggctcgggaatcctacctgcagtggttgcgggatcaggagaaacaggctcgccaggtccgaggccccagccagccccggaaagccagcgccacatgcagttcggccacagcagcagcctccagtggcctggaggagtggactagccggtccccgcggcagcggagttcagcctcgtcacctgagcaccctgagctgcatgctgaattgggcatgaagcccccttccccaggcactgttttagctcttgccaaacctccttcgccctgtgcgccaggtacaagcagtcagttctcggcaggggccgaccgggcaacttccccccttgtgtccctctaccctgctttggagtgccgggccctcattcagcagatgtccccctctgcctttggtctgaatgactgggatgatgatgagatcctagcttcggtgctggcagtgtcccaacaggaatacctagacagggactcgggcaagggtgccgaagatagacaagaggcacacagagacagaccaactggcagccaggcagccccagaggagagagacattcagacagaggaaagtctccctgcccctcattccttccaagatgagaaaaacttgccgccaccccccgacactgatgccagggaggtgggaggaagaagtgggaaatttcccttcccagtacccccaagaacgtctgagccttcaatgttgaattttttctttattaaaattacttttatcttataaaatcaactaatcaaaaatgatatagacgacagcactggctctgtgaaggtggcatctttctgggcaggcaggccatggggcatggaggagggtgcaaagatatgggttgctgtcttctggcctccagctgcatggaggccggcccagggtctagggtgtgcactgggcaagggcagggcggcaggtgtcaggccggcttggacaatgaaaccctgaccttgctgcattccttttgcttccaccaccactagcttctttggaatcttggggtgggggtcatctttggggattatggctgccacccgggatttgagtgtagggagtgtgggagcagccttggcagatggggcacccgtgccctgcaggtgttgacaagatccgccatctgtaatgtccttggcacaataaaaccaaatgtcagtttccctgagcgactctgttctgtgtggggcaggggttgggcgggcctctgggcagaggatgcaatggcacggaccttggcttgacctcagaggtgtgaatgctctccagcagggtctgtctgggggcctggagtttgtatttgatttgctgcttattaaacctccttctggacctattgccactggaaaagc

SEQ ID NO: 314 - protein, 631 aa, Homo sapiens
MTILPKKKPPPPDADPANEPPPPGPMPPAPRRGGGVGVGGGGTGVGGGDRDRDSGVVGARPRDPPQGPLPGPPGALHRWAVPPGAVAGPRPQQDPPCGGPGGPGGGPGDALGAAAAGVGAAGVVVGVGGAVGVGGCCSGPGHSKRRRQAPGVGAVGGGSPEREEVGAGYNSEDEYEAAAARIEAMDPATVEQQEHWFEKALRDKKGFIIKQMKEDGACLFRAVADQVYGDQDMHEVVRKHCMDYLMKNADYFSNYVTEDFTTYINRKRKNNCHGNHIEMQAMAEMYNRPVEVYQYSTEPINTFHGIHQNEDEPIRVSYHRNIHYNSVVNPNKATIGVGLGLPSFKPGFAEQSLMKNAIKTSEESWIEQQMLEDKKRATDWEATNEAIEEQVARESYLQWLRDQEKQARQVRGPSQPRKASATCSSATAAASSGLEEWTSRSPRQRSSASSPEHPELHAELGMKPPSPGTVLAKPPSPCAPGTSSQFSAGADRATSPLVSLYPALECRALIQQMSPSAFQDWDDDEILASVLAVSQQEYLDRDSGKGAEDRQEAHRDRPTGSQAAPEERDIQTEESLPAPHSFQDEKNLPPPPDTDAREVGGRSGKFPFPVPPRTSEPSMLNFFFIKITFIL

SEQ ID NO: 315 - DNA, 2482 bp, Homo sapiens
cagctatgctcccgggagtgttgatgttttccagtcattccggctgacagcgttcaagttggaatcctggaggggaggtgtttttcctgtcgtacgtgggacaggccacgctgtccgtccgcagtaccgacgcctgcaggtcagagcttcggggagaaaagtgaagagcaagacggaaccatgactatactccccaaaaagaagccgccgcctcccgacgccgaccccgccaacgagccgccgccgcccgggccgatgcccccggcgccgcggcgcggcggaggtgtgggcgtgggcggcggcggcacgggcgtgggcggcggcgatcgcgaccgtgactccggcgtcgtgggggcccgtccgcgagcttcgccaccgcctcaaggcccgctaccaggaccgccgggcgctcttcatcgctgggcgctggccgtgccgcctggtgcagtggcgggtccccggccacaacaggcttctccacctccttgcgggggcccaggtggtcccggcggcggtcccggcgacgcgctgggcgcagcggcggcgggtgtgggtgccgcgggcgtggtggtgggtgtgggtggtgccgtaggcgtgggcggctgctgctccgggcctgggcacagcaagcggcgacgtcaagctcccggggttggcgcggttggcgggggcagtcccgagcgtgaggaggtcggcgcaggctacaacagtgaggacgagtatgaggcggctgcagcacgcatcgaggctatggaccctgccactgtcgagcagcaggagcattggtttgaaaaggccctacgagacaagaagggcttcatcatcaagcagatgaaggaggatggcgcctgtctcttccgggctgtagctgaccaggtgtatggagaccaggacatgcatgaggttgtgcgaaagcattgcatggactatctgatgaagaatgccgactacttctccaactatgtcacagaggactttaccacctacattaacaggaagcggaaaaacaattgccatggcaaccacattgagatgcaggccatggcagagatgtacaaccgtcctgtggaggtgtaccagtacagcacagaacccatcaacacattccatgggatacatcaaaacgaggacgaacccattcgtgttagctaccatcggaatatccactataattcagtggtgaatcctaacaaggccaccattggtgtggggctgggcctgccatcattcaaaccagggtttgcagagcagtctctgatgaagaatgccataaaaacatcggaggagtcatggattgaacagcagatgctagaagacaagaaacgggccacagactgggaggccacaaatgaagccatcgaggagcaggtggctcgggaatcctacctgcagtggttgcgggatcaggagaaacaggctcgccaggtccgaggccccagccagccccggaaagccagcgccacatgcagttcggccacagcagcagcctccagtggcctggaggagtggactagccggtccccgcggcagcggagttcagcctcgtcacctgagcaccctgagctgcatgctgaattgggcatgaagcccccttccccaggcactgttttagctcttgccaaacctccttcgccctgtgcgccaggtacaagcagtcagttctcggcaggggccgaccgggcaacttccccccttgtgtccctctaccctgctttggagtgccgggccctcattcagcagatgtccccctctgcctttggggactcgggcaagggtgccgaagatagacaagaggcacacagagacagaccaactggcagccaggcagccccagaggagagagacattcagacagaggaaagtctccctgcccctcattccttccaagatgagaaaaacttgccgccaccccccgacactgatgccagggaggtgggaggaagaagtgggaaatttcccttcccagtacccccaagaacgtctgagccttcaatgttgaattttttctttattaaaattacttttatcttataaaatcaactaatcaaaaatgatatagacgacagcactggctctgtgaaggtggcatctttctgggcaggcaggccatggggcatggaggagggtgcaaagatatgggttgctgtcttctggcctccagctgcatggaggccggcccagggtctagggtgtgcactgggcaagggcagggcggcaggtgtcaggccggcttggacaatgaaaccctgaccttgctgcattccttttgcttccaccaccactagcttctttggaatcttggggtgggggtcatctttggggattatggctgccacccgggatttgagtgtagggagtgtgggagcagccttggcagatggggcacccgtgccctgcaggtgttgacaagatccgccatctgtaatgtccttggcacaataaaaccaaatgtcagtttccctgagcgactctgttctgtgtg

SEQ ID NO: 316 - protein, 609 aa, Homo sapiens
MTILPKKKPPPPDADPANEPPPPGPMPPAPRRGGGVGVGGGGTGVGGGDRDRDSGVVGARPRDPPQGPLPGPPGALHRWAVPPGAVAGPRPQQDPPCGGPGGPGGGPGDALGAAAAGVGAAGVVVGVGGAVGVGGCCSGPGHSKRRRQAPGVGAVGGGSPEREEVGAGYNSEDEYEAAAARIEAMDPATVEQQEHWFEKALRDKKGFIIKQMKEDGACLFRAVADQVYGDQDMHEVVRKHCMDYLMKNADYFSNYVTEDFTTYINRKRKNNCHGNHIEMQAMAEMYNRPVEVYQYSTEPINTFHGIHQNEDEPIRVSYHRNIHYNSVVNPNKATIGVGLGLPSFKPGFAEQSLMKNAIKTSEESWIEQQMLEDKKRATDWEATNEAIEEQVARESYLQWLRDQEKQARQVRGPSQPRKASATCSSATAAASSGLEEWTSRSPRQRSSASSPEHPELHAELGMKPPSPGTVLAKPPSPCAPGTSSQFSAGADRATSPLVSLYPALECRALIQQMSPSAFGDSGKGAEDRQEAHRDRPTGSQAAPEERDIQTEESLPAPHSFQDEKNLPPPPDTDAREVGGRSGKFPFPVPPRTSEPSMLNFFFIKITFIL

SEQ ID NO: 317 - DNA, 2656 bp, Homo sapiens
cagctatgctcccgggagtgttgatgttttccagtcattccggctgacagcgttcaagttggaatcctggaggggaggtgtttttcctgtcgtacgtgggacaggccacgctgtccgtccgcagtaccgacgcctgcaggtcagagcttcggggagaaaagtgaagagcaagacggaaccatgactatactccccaaaaagaagccgccgcctcccgacgccgaccccgccaacgagccgccgccgcccgggccgatgcccccggcgccgcggcgcggcggaggtgtgggcgtgggcggcggcggcacgggcgtgggcggcggcgatcgcgaccgtgactccggcgtcgtgggggcccgtccgcgagcttcgccaccgcctcaaggcccgctaccaggaccgccgggcgctcttcatcgctgggcgctggccgtgccgcctggtgcagtggcgggtccccggccacaacaggcttctccacctccttgcgggggcccaggtggtcccggcggcggtcccggcgacgcgctgggcgcagcggcggcgggtgtgggtgccgcgggcgtggtggtgggtgtgggtggtgccgtaggcgtgggcggctgctgctccgggcctgggcacagcaagcggcgacgtcaagctcccggggttggcgcggttggcgggggcagtcccgagcgtgaggaggtcggcgcaggctacaacagtgaggacgagtatgaggcggctgcagcacgcatcgaggctatggaccctgccactgtcgagcagcaggagcattggtttgaaaaggccctacgagacaagaagggcttcatcatcaagcagatgaaggaggatggcgcctgtctcttccgggctgtagctgaccaggtgtatggagaccaggacatgcatgaggttgtgcgaaagcattgcatggactatctgatgaagaatgccgactacttctccaactatgtcacagaggactttaccacctacattaacaggaagcggaaaaacaattgccatggcaaccacattgagatgcaggccatggcagagatgtacaaccgtcctgtggaggtgtaccagtacagcacaggtacttctgcagtggaacccatcaacacattccatgggatacatcaaaacgaggacgaacccattcgtgttagctaccatcggaatatccactataattcagtggtgaatcctaacaaggccaccattggtgtggggctgggcctgccatcattcaaaccagggtttgcagagcagtctctgatgaagaatgccataaaaacatcggaggagtcatggattgaacagcagatgctagaagacaagaaacgggccacagactgggaggccacaaatgaagccatcgaggagcaggtggctcgggaatcctacctgcagtggttgcgggatcaggagaaacaggctcgccaggtccgaggccccagccagccccggaaagccagcgccacatgcagttcggccacagcagcagcctccagtggcctggaggagtggactagccggtccccgcggcagcggagttcagcctcgtcacctgagcaccctgagctgcatgctgaattgggcatgaagcccccttccccaggcactgttttagctcttgccaaacctccttcgccctgtgcgccaggtacaagcagtcagttctcggcaggggccgaccgggcaacttccccccttgtgtccctctaccctgctttggagtgccgggccctcattcagcagatgtccccctctgcctttggtctgaatgactgggatgatgatgagatcctagcttcggtgctggcagtgtcccaacaggaatacctagacagtatgaagaaaaacaaagtgcacagagacccgcccccagacaagagttgatggagacccagggattggacaccatctcccaaccccagggactcgggcaagggtgccgaagatagacaagaggcacacagagacagaccaactggcagccaggcagccccagaggagagagacattcagacagaggaaagtctccctgcccctcattccttccaagatgagaaaaacttgccgccaccccccgacactgatgccagggaggtgggaggaagaagtgggaaatttcccttcccagtacccccaagaacgtctgagccttcaatgttgaattttttctttattaaaattacttttatcttataaaatcaactaatcaaaaatgatatagacgacagcactggctctgtgaaggtggcatctttctgggcaggcaggccatggggcatggaggagggtgcaaagatatgggttgctgtcttctggcctccagctgcatggaggccggcccagggtctagggtgtgcactgggcaagggcagggcggcaggtgtcaggccggcttggacaatgaaaccctgaccttgctgcattccttttgcttccaccaccactagcttctttggaatcttggggtgggggtcatctttggggattatggctgccacccgggatttgagtgtagggagtgtgggagcagccttggcagatggggcacccgtgccctgcaggtgttgacaagatccgccatctgtaatgtccttggcacaataaaaccaaatgtcagtttccctgagcgactctgttctgtgtg

SEQ ID NO: 318 - protein, 561 aa, Homo sapiens
MTILPKKKPPPPDADPANEPPPPGPMPPAPRRGGGVGVGGGGTGVGGGDRDRDSGVVGARPRDPPQGPLPGPPGALHRWAVPPGAVAGPRPQQDPPCGGPGGPGGGPGDALGAAAAGVGAAGVVVGVGGAVGVGGCCSGPGHSKRRRQAPGVGAVGGGSPEREEVGAGYNSEDEYEAAAARIEAMDPATVEQQEHWFEKALRDKKGFIIKQMKEDGACLFRAVADQVYGDQDMHEVVRKHCMDYLMKNADYFSNYVTEDFTTYINRKRKNNCHGNHIEMQAMAEMYNRPVEVYQYSTGTSAVEPINTFHGIHQNEDEPIRVSYHRNIHYNSVVNPNKATIGVGLGLPSFKPGFAEQSLMKNAIKTSEESWIEQQMLEDKKRATDWEATNEAIEEQVARESYLQWLRDQEKQARQVRGPSQPRKASATCSSATAAASSGLEEWTSRSPRQRSSASSPEHPELHAELGMKPPSPGTVLAKPPSPCAPGTSSQFSAGADRATSPLVSLYPALECRALIQQMSPSAFQDWDDDEILASVLAVSQQEYLDSMKKNKVHRDPPPDKS

SEQ ID NO: 319 - DNA, 34045 bp, Mus musculus
tgctgaggtctaggctcatggaggatctgtgcggggagacccatgaacttttgggtcaaaaagctgagaaagctatggtgttttgcctggccagttcaaatgtcctgctaagtccctgctctttccttccatcaagatcagtacctgggaagtacgcctgtgggctctggggtctatcgcctgcatcaaggaaaaggtaatgctgcttactctcttgggatctctgtctaggactgggagcaaatggggcttctagcccaggaccctgctctctaaagcccaggaccctggtcttactgcctgcaggtatgatgccgccgccgcctatgggcatgatgccgccgcctccgccacctcccagtgggcagcccccgcctcctccctctggtcctcttcctccatggcagcagcagcagcagcagcctccgccaccccctccgcccagcagcagtatggcttccagcacccccttgccatggcagcaaagtgagtggaatattttgggcttgtgggggtgggtgggatgtgggctagggctgaggggaacaagaacctcataatttcacacaggctggagacaccttcattgaggactctggtctctcagcaagggcagtggggttgaaagccaggctgcctggcccaagggaatgtcttggggaggagagctgatgtttggcgtggttgtgtttgggagagacttgggaggtctggaggggagcttgctgttgtagatagagcaccagaagtccaggctaagctgctgaatgagctgctggttcggccatgccttgtgagcggagtcaagagtgggatggtgcatgcatgttctggagggggttgtgattgggcctgagagactgcagaaaaaagggaaggggccgatggggagagagtagttgtgggcttgaggttgaatgtgccgttcggtggtggcggcggctgggcggagggacgtcaaagccggttcttgtgtctggaactttcccctgagcccctccaggggcattggtgacaaagggcttactttgttaagcccagagaccatgaggctgaccccagggtagtcctgcccacccctccactcccatcaccaggacagccccgcccgcccgccccccaccaccgtacagcatgccaaagcaaggagcaggcgcccctcgtcccccctgtcccaaggcagcagccgcagagagccgcggtgtacccccgcgcgtgtgaccttgggcttctttactaccccagatacgacgactaccaccacgagcgctggcacagggtccatcccgccatggcaacagcagcaggcggctgccgcagcttctccaggaacccctcagatgcaaggcaaccccactatggtgcccctgccccccggggtccagccgcctctgccgcccggggcccctccccctccgccgcctccgccacctggttccgccggcatgatgtatgccccaccccctcctcctccgcctcccatggacccttctaactttgtcaccatgatgggcatgggggtggcgggcatgccgcccttcgggatgcctccagctcccccaccgcctccaccacagaactagacttgtttttttttttttaagaaaatatatattatatacatagagagttggtctcttataaacacacgccgaacctcaccatatggagccagacattgggatgcacgcatgtgattgtgtgtgcacgcatgtgtgtgtgtgcacgcactgggctgggccaagtgactggactcgcttgggaaacgggcagtggtagtggggcgccagcttgagctttcctggcacctgtagcatcgagtgtcttctttgtcttctctcctcacccaactccctctgcctctccccaaaccgggccgccaggatccctccccgcggcagcgatggcccgagccatgagagtgaggactttccgcgcccattggtgacccttccaggcagacagcctcagcagcgcccctggtggacaggatggttcggcaaagcagcctgagttatttttgtggacggaatcggaacacactggctccatattgtgaaatttttattaatttttatctttttcctttgttatttccttatcttttcctttcttcagactccgtccaaggagatgctctccccggtcttctgctgcagataggatccttcccttgtctccattcctctcctcccaaagggagaggggcaaatggtttaggtacaggctttggctattaatgtcaggcttggtggtgggagtggggggtcctatggttctaattgttgaagggcttcagccacattcaaaataagtaggtggtttatctttgacatcttttaaagagtctggataaatctgactcgttgctcaatagggtttatttggcagtgggattcacatcttcctgcactcctgccagcagtacagggcacagcccaagccaccataggccagcctggagtctttttcatgctctggtcacccaagctgcctcagaacccatttgcttctctccttcctggaaagcttccctttatgttttattttgaccccagatgtccagatgttttgcagtgtctggggcttgtgtcccttgttcttcgttctgctgctttgccccttccttccctcttcatggagtgattatgttgataataatgtgtaatgcgcgttcttttcactggtttatctacagaaatttctctgggcctttttttctgtgtttgattcaacactgcactaagggggaaatgttccattgaataaaagagcagtgtggttttccgggtccgtttcttttcttttaaaacctttttcctgaccatcagcaccaagttttacctacctaccctggccccagctcctgcatgtgaatggcttcagcccctcactttttctagtttctagttgatagaactgaaaagcaggctcactccacatttcaggagtctttgtcattgtgacagccttttcctggggctccgacccccacccacattgatgagctctagataggatttgtgtctcctagctgctgcccgacttaaggacctggacctggggaggcatcagcactaaaggtcacgctaactaatcctgcttgtcgggcacagagctgctaaaattaaaactgccaagtggctttttttctttctctgctggtggctctcagcctgccaggactgcaggtctaggggagtagtagggacaaaacgtggtgccctgtgctgagtggccacgtctacagagtcttctgcagttctcctgtttagggtactaggaaaatcaccccttgtgtctttgtgagagccacgtctttggcagctcatacagctgctgctgctttgtctagaggcttgagggcagttgctgtctacccttaggcttcctaaccaagccctcaactagaggttttccctattgtctttaaccttacagtgtgggggcagggcctggccaccctcttcgaccttggctttacctcattgcttccctcacaatcttggtttccctggtgggctcattgggcggttaattagctctttgaagctctggaagcggcaaagtggcgctgtgtgggttttagaagtaaaatcaataaatgacttaaccatggctcagccatcctctggtcttgccctcctccctgtgcagtgtgctcttaatggcccctctctcaccctgctgccagcctttgttaagagtttccaagagcaagtttgaaggcccagctacaacaagcacctgtgcatagtgtcagtatttaggaggtgggaaatatccatttggcctacatgccaacttaggtaggaaacacagtcctattgtgtcagggttatgtttcattagacaccagtgtttgatgctggcagcagtatccctatctcctcagaccttggcaagggacatgctaagtagaaacagcatggggtctctgtttatttctaagactaagacaattacttagcagaaactcaacattggttcaggtcgggaggccaggtttctaattagaaacttagacataacttcagcttggtctgggttggatgtatttccagggatctaggaagtatccatatccctgagtaaaggaagggaaggggcaggagtggtgagaggagtatgtttgagactgggggtcttatgctgagacagggtgtgtagaatagaggaagtgggaaccctgctatggaggttacagaaagtccctggataaagtccgtgacaagcatgtgtagccctttgacttggcagggctgtttagtctttggctttgtaacattatgtgtgtgttgggccatatttacagccctctctcttgctgttggttgcaggttggattaaaggagttggggggctggaaagatggctcagtcttcaagggcactgtctgttcccagcgttgtgcctcatagccatctatagtgtgatctgataccctattctggtgtgtagatgtacgtgcagatagagtactcagtggggctgggttgatagaggcaggacaggcctgagaacctgtggggagaacatcaggtaggatgggctgcgttgataggcaaggagcttaggagcaatagaatacaggtggaggagtgtgaattggtaatatggataacaagctatggttggtgactaaagaaaagctctggccgccttagccttccaggagacagtacagcccaagctaactttagaatgaggtgcagagaagcagaggctggaaaccacaaaatgatggtcacttgggaagcaggggcaggctggtgacagcaagttctagggcagccaatgctacacagagaaaccctgtctcaaaaacagaaatgatggtgatataagtgttcaaacattgccaagtgttatagggcttgtgtttgattcttagaacctgaatgctaggtctaaggctgggtgcaagggtgcaccctttaattctagcacttaaaggaagagtcaggaggatctttgcatttgaggccaagttgaagttttaggccaaccaaggctgttaagaaacccaccatggtcagcacaaattaataagcttttatgaagccaggcagtggtggcacactttaagcacttgggaggcagaggcaggcagatttttgagttcgaggccagcctggtctacagagtgagttccaggacagacagccaaggctacacagagaaaccctgtctcaaaaaactaaaacaaaacaagcttttatgaaaaagttgccacaagggactgagaatggctcagcgggtaagagcactgactgctcttccaaaggtcctgagttcaaatcccagcaaccacttggagactcacaaccatctgtaatgagatccgatgccctcttctggggtgtctgaagacagctacagtgtacttacatataataaatcttaaaaacaacaaaaacagtttagcaggtcgtggtggcgcacacctttaatcccagcactctggaggcaaaggcaagtggatctctgagttcaaggccagcctggtctacaaagtgagttccaggacagccagggctatacagagaagacctgtcttgaaaaagcaacaaaaaagtcacaaaataaggcaaattctcaagaacttataaattcagctatgagcagtgctggggaggtaggagacatgaggattcctgcagcttgctggggtatagttagttcaggtcagccagaactacatagtggaatgtgcccaaaaatcactgatggccaggcagtggtggtgcacacctttaatcccagcactcaagaggcagattccgggctggtgagatggctcagtgggttagagcacccgactgctcttccgaaggtccagagttcaaatcccagcaaccacatggtggctcacaaccatccgtaacaagatctgactccctcttctggagtgtctgaagacagctacagtgtacttacatataataaataaataaatcttaaaaaaaaaaaaaaaaaagaggcagattccaagaacctgtatgaaattggcacataaagatatatggagtttgctgatcactattctaactccagtttcagtgtgacccatcccagggtctgggtgggaggtgatccagcaggacactaaccctctagcatgcacacagaaagtcacagaggccctaaaccatcacaagctggaagtgaagagcaagcctgtcttgtcatgctagaaggcgctctgcaggctgctgggagagaagagttgcagctgtgctctcctgcaacagggacaaatctcttggaagtaatcagccactgtttggaattggagacctccacaggaagaaattcacatatggcactgtaagcttagttaaatgctcatgattaaggagcatttaggtcttgggaaacaactgctgtaatttagtgaaatgctctgaatggtctcatcaaattgccttctcaataattgtggctatagattagtgttaaggttaacttcaactcgtagagatccgcatggccttgagttctgggactaaaggtgtgtgccactgcgctctgcaagtttacctttgtgtatgtgtacatgtatgctgtgtgcagctgcctcagaataacaagggagcactggatccttggagctgcagtacaggagctactgacaagttctgggacccaaatttgggtcctcgggaagggcggcaagtactttacctgcttaggccatctctaaccccagaggccttgctttgcgtgtcgggcgggggtgggggtgggggggagacagtggtaactgcagatacaccttactggtcagagtgctgagggtgactcgaatgctcagtcataaatgatatattcatattaccccaaggcttagaggacatggtgaaacagggcatagataggagctggaggatgatagagtggggtatcatgtggtcttcagggccatcttgagctccagcagctgtgattaactacataagattggtcttgccaacatcctgttttggaaggggatgagactcccaaggccccagtcctccctgatgataaatgggtagttggttgctgagggagggaagagacattttctgcagtggtgtaggcactgttaagatgcccatgttcgccgggcatggtgatgcacgcctttaatcccagcactcaagaggcagaggcaggcggatttctgagttcgaggccagcctggtctacagagtgagttccaggacagccccaggactacacagagaaaccctgtctcgaaaaaccaaaaaaaaaaaaaaaaaaatgcccatgctcagggctggagagatggctcagtggttacaccgactgctcttccagaggtcttgagttcaattcccagcaaccacatggtggctcacaaccatctgtaatgagatctgatgccctcttctcgtgtgaagagagctacagtatattcttatacataagataaatctttaaaaaaaaaaaaaagtccatgccccagtaaagacctctcatccatgcttctataagccagcagccctagtgccctagtggttttcactgggacacacacacacacacacacacacacacacacacacgacagaagcagactggctagttgagaatcagaagtgagatccattaagagagtggaatggggagtgaatatgatcaaaatacatacatatatatgcatgatgtaatgaaagccattgttgtacataatgctaataaacatctgaaaaaatgagaattatgaaagactaaaacgtggctggcaagatgcttcactgggtaaaagcacaagcctgatgactccctgactttggtccctggaacccaaggtagaaggaaagagtcaacttgccaaaattgtcctttgacccctgtctgtgtaccccacactcacacaataataaatacaacttaaactaaagatggaagtagagtgggggaacgtagctctatgtagagtacttgcctaacacgcacaaggtcctaggcactggaaaatgtagagaaaaatgtccatgctatattcccactccatctgtgtaagcatctgtgtttgcttcctggctgctatatttgataacctggctccaggaagtgagcagggcattgtgcccacggtaggggcagtcagagcttagcctgaaaagacctgagtggcttgcaggttaggccacacagtttgagctgcctggggactctagaaccccacctgctaaagggcagaaagttctcagaaactgcttggctatcccagagcccggttcagtagcatcctgtagttatccaacttcttggccttcagagtagaacacccagtccttcccctcagtcagcctgctactctggaggcacagccagcttgtgaattagcctgagagcctaagctctgttccctcaaagaagcaggagctaatgtctgtcttccctccactccacaattaggaggcaacagctcatgaggcagaaattttattcaagaatactcaagaatacaaacaatcagcctgtggacacacagcaagatagtgctggggtcagtacatgggctgcaatggagacagcctaagactagaagggagagcctagtaccggtgggtgagtggagaaaagtgacagacaaggctccttgaagtcacagagctaacacaaaatacctgcccactgtagagcctgcgtgagaacaggagagagagcctctagtcgcctcccgctattatccaggagttggttagttggttgggttttgtgatggtagaaattgagtgcattgtctcagccctctattatggcgcacacctttaatccagtacctgagaggcagaggcaggtagatctctgagttggcagccaatctggtctacagagcaagtttcaggacagccaaggcaacacagagaaactctgtcttgaaacaccatacataaacaaaatgaaaactaaaaatagaagacttgaacttatggtcctactgtatcagcttcctaagtagcattccgggctggtgacacccccatttatcccatgtcatgaactcctggggattgttgtctttcacacacacacacacagaggcacacacacacagaggcacacacgcacacacacaaacacacacacacacaccccgcagaccacaggactatagttcccagtagcccctgcttcaggctgcagcctcagccaaagctgtcctgtaacccgaccaaccatcccctctggaaaaggtcacttcagagctccttgaaggacagctgacagggggaagctcagaagcaccaggcgttggtgggggtggggtgaaagcagtggctctccccccaccccagacatctctccttccccacagtgctccctgcaacccaggggcttggtctccctccacggctgccagcctcttctgtattagcagtgcctctgtttaggacacagactcagcttatggctctgctgtccatgctcacaacctccaagtctcagtgcagccatgtcccagtgagaagtggctgtgaccagcttaatagccacttcgtcatgccccactggtggtactctaagcagatgtcacacacaaaccctgctgctcggaggaaaggagaaagtgtcctgtatttgtgacagccctttggcctctctaaagaggatctccaatccagtcccaccttttatctgtagctcaagaaaggtcccagattggataatgtcttagacaaagtctcaaccagaatgcgttaggcaagcctcaggccttccaaattggtccccctgttccagtctttcaaaagccaagggccagtggataagaccagaaggcttaggaaacctggaagaagtgggtcagctgtgaacacacccctctctgggctgtggagagcttgttcctccctcctctcctctctgcttccccccaaaatagctccctgagcttcacggccaagaccctcccacgtccggggaggcgtggcatgctgccctgagccaggctttaaatcccctcacagctgggcagctccactccctggttggaggcagctaggaggccatcatctgtccagttcggcccaccctctcacagccatgtccaggcctctttcagaccaggataagagaaagcaaatcagcgttcgtggcttagccggagtggaaaatgtgtcggagctaaaaaagaacttcaaccgccacctgcatttcaccttggtcaaggatcgcaatgtggctactccgagagattactattttgcactggcccacactgtccgggaccacctcgtgggacgctggatccgcacacagcagcattactacgaaaaggaccccaaggtgctacaggaggggacaccctgggtgggaattagcagggagttgggcctggcagagagttgagacatctcaggcatgtggcagctcctttctgaggcccaagttttctacagaaaaatcatttgctgttttaggagtttgggattgcaggatctaagggtgctagacagaacactgaggagggagacccaagggtgctcggggtaggctacacgtgctagatagggttggaggggctgctggtaggcaggaaatgtatacccctgtggcctgatttggacctggcatggaaggacatgtcatcagatgtgtgcacggtacagtctgcttgtgccacaggcagggcaaagctggggcagctggcgtcgtgggtatcaagtatctggcagggtcactggtaaatgtcaggaacttaaccccacaaccaggatcggggagggccagggagggccccaggaaatgggaaggccgtgccttcagcatcttcatgcttctgctcgtgtccggactgaggcttagggacgagggggagcagcattgcatggacagaaggcagttccagccctgagtcactgtgcgaccttgaaaatgactttttcctccgggccttggcaaggtcttctcggggaacactcaaagctgcttctcaatacctcaaaaggggtccccacttctcacaagcaccttaacccctgagataggcctggctagccttactctctagaagagaaaccaagccagatggaaaggcatttcaaaggaacacagggaccaacacctctgttgggccccaaagtctgaaatagccactctgagcaggcagacaagaactgctgacagagacgagacattctggggcctggcggtagggcaggagggtgagaggtgcaggcccagctgttcctgcctgaatgtcagtggggtggccctgacccctcttccccgttgcctgtctctgggcagaggatctactacctgtctttggagttctacatgggccggacactgcagaacaccatggtgaacctggccttggagaacgcctgtgatgaggccacttaccaggtgggggaagcacttaaggttgggtggggggtgtcttatgctggcacttgggcctgacggctgcctccccttcccttagctgggcttggacatggaggagttggaggagatcgaggaggatgcagggttgggcaatgggggcctgggacgcctggcaggtgagtccatagcttgtgggggtggggcaggggagtttctcacgctggatccctgatactcactcctctctacgcctagcttgctttttggactccatggccaccctggggctcgctgcctatggctatgggatccgctatgagtttgggatttttaatcagaagatctgtgggggctggcaggtaagccacccagaccccaaccttgtggtgcttagtcacaatagagaggttctccattcagtcatatatctctggatgggtccagaagccaccccagctccccagatgaacatcctttccttctgcttcaaagcctggggacccctgtggtcccgtgaacacactgtgtcctgctgggtggcccactactcacagtacgtgagtacctggagctcctgtcacctacgtcctcccccactcctctagatggaagaagctgatgactggcttcgctatggcaacccctgggagaaggcccgcccagagttcacgctgcctgtgcacttctatggccgagtggagcacaccagccagggtgccaagtgggtggacacacaggtaaggatgaacatggccacaggttcttggtgggggagagggtggactcggtgagaggcaggaaggaagaggagctgcctgagaaaatgacacggggaagaggcagaagggaactgaaccccctgctactttacaaaggaggccactgaggctcagaaaggtcaggggagttactggagtcacacagtcagagcagggagatgccagccagggtcatccaggacagcaggcaaagttcaacccctggaaggaggaatgaaatgtccctcctccagctgcactccaccctgacgccccttttctcgacacacgacagcacagtgtgatggtagtgatggtagtcatctctgcatatctgtgccggggatctgatgaaggcagcagccccgagagaggcaggaaagaaaacggggcctcttgggtggcactgggcactggcatactcacagccacacagcaagttgagagagtctgaaaggccacctggatgccccagtccgtgactccctcctacgtgtggctgcagttatcagtctcctccagggctgcatggagacccctagcccttcggcaatggtgtttgtagctctttgatttagacctgggcccagtcagggctgctgctgttggacatgccaggtgcctcagacagcctggcacagttagctctggctggaaagttgcagacctgactccctctagctttccacctgctgtctgttcagatagtccctctgtctctctcacctgcattcccctctgccccatcaagggtatcacttggtgtctgggaggcaagctgaggccccatatagagactactctggaggtgccactggcactgtggaagctggcagttctgtagcaaattggtacttatagatcatgggaggtggggctggctggcactggttactgctaactagcccagtggctacctagatgtaaacctctggatagagttgacccctgcgtaatcttcatcctgaacccgagatcctccagccctctcctgagtccagtgtggtctcatttgatcaggccgggctgtggagcagccactgacagaagcatgctttggcttctgcatttgtcactctctcctgtcccataatcctcatgacagtcagagtaggcaggtgttgggatttcccgtgggatgcaggagagacttacgtaattactgcagcgctggggactgagaggtccttgcacctgtttggcaagtaatgtaccattgagctatatcctcagcccctttttattttttacttgacaagggcctcgctacgttgcccagactggtcttgaactcacccggtaacttacgcaagccttgaacttgtgatcctctggtcgtagcttctccagtgacagggcttctgggaacccagctagtaagcctcacaggaggaactgtagtctctcttgggcactggcagagttcagtgacagctatttgaacttcagctcttggtgggagaggccccacaaaccagcctcaggccctgctcagggctggaccctggcagcttctgacttgggtaccccctgtaggtagtgctggctatgccctatgacactcctgtgcccggctatcggaacaacgtcgtcaacaccatgcgcctctggtcggccaaggcacctaacgacttcaacctcaaggactgtgagtccctctgctggtagctggcagcccttgttacccctgcttggcccatgcccagccccagcctcatcctgacccactttgtccctcagtcaatgttggcggctacatccaggctgtgctggaccgaaacctggccgagaacatctcgcgtgttttgtaccccaatgataatgtgcgttgcccttcagactggagactggaagcccaaatccctggggagggacaggggagctaggggacctttgcaactgtcctagacctttattactatccctgtgtgtctgtcctatcaagtcctttgagtcctgagggaggggctgggatatgacatttcctgagaactgtattcctgggggacactcacaggacacctcactcatctgtgtctttctgatatcatctgctgtagttatttggtggggcaaagacccctgggtccagaaggtgggggcggtttagggctctgggacattgtgcggtaggggctctcctggtcacactcacagtcttttagggcccaccccctgccatctcaactgcactctgtcttgcaccttagttctttgaagggaaggagctgcggctgaagcaggagtactttgtggtggctgccaccctccaggacatcatccgacgtttcaagtcctccaagtttggcagccgtgatcctgtgcgcacaaacttcgatgccttccctgataaggtagcctgctggcctgaaggcctctgtctccctctctctagagtcccgtggcctcctccttccagccgcacttcacagatgagtggaggctgggagtgtatgggggagatggcttgctcagctcaggatcttcaggcaccagggacaccgctccagccaccaccatgcctgctcccagcccagccacaaaacttagtctggccttttggggactctgaaggggcattcacaatagtccttggtctggaagccatcctgactgccactcttcccctgcaggtggccatccagctcaatgacacccacccctctttggccatcccagagctgatgaggattctggtggacctggaacgactggactgggacaaggtgggtatcggccacctcacccctacaggagccattctgtcccagggtctccttcatagtgtgaggaggaaggtcagcagtgggctgaacaaggactgtggaccagagggctcgctgaaacccagttgggccctgggggtgccattcgctgcagagcgaatgtgtggagatcatctgtcccgacctcctgcattgtacgccaggcctgggacgtaacagtgaagacctgtgcctacaccaaccacacggtgctgcctgaagccctggagcgctggccagtgcacctcatggagacactgctgccccgccacttgcagatcatttacgagatcaaccagcgtttccttaacgtgagctggggacaacgtgggagaggggccccagccttgaagtcaggaagcctatgtgccgagtctgtggggttgagggagatggggcggggagcgggggaaggtagagggctggagactaatcctgggtctggatcctggtcttagcttttggttctttgggggcacagcgggtggcggctgcattccctggggacgtagataggctgcggcgcatgtcactcgtggaggaaggagcagtgaaacgcatcaacatggcacacctgtgcattgctggctcgcacgctgtcaacggcgtggctcgcatccattcggagatcctcaagaaaaccatgtaagcctctccaccagccccgaaacaccacacttccgctgcgtataggccccgccccttcacctgacaccagccaggatttcctgggcagacccctcccctgagtgaccttccaccctgtttgctcactcagggcagacttagcagcaagcgaccataacattgagccatccccacccacctcacattcttagaacacactagcctcttcccagtatagtcctgtcccagatgacgccctcttacacacagcacccctacctgccccaggtcggcacctgcatccaagcctctttcaggaaaaaaagaaaaaaaaaaaaaaccctcaaggaggggccaggtaggagggcgcttcagaggttaatggtgaccctcacccaatcctaacccgcagcttcaaggacttttatgagctggagcctcacaagttccagaacaagaccaatggcatcactcctcggcgctggctggttctgtgtaaccctgggctggcagaggtcattgctgaggtgagagatcgtggtatgactgataggaccaatagaggtcactccaagatagtcaagtgggtagctccctatatacaatggacccagctcaggactacaatcctgtactgtgttcccaaggctggcatccacttggaggaagtgggcactgctttcttatttaaacaagcttgccctctggccaaaggaggacctggctaccgaggccaacctgctagaggtcacagtctaatgaaaagtgtcatcacatctgaaaggagactgcagagaggcagaggtttggtggggaggctggaccaggtcaggccaacaggaggaaagggcagaggtcgggaggcctgctggggtcaggtggagcagtcaccggaggggctcagtgctagtgctggagaaagatggctttgggaagagaagtccaaggtggaagggtctagttagcctggaggacgtaggccaggatagggtggccctggctgaaagccatcttcccacagcgcattggtgaggactacatctcagacctggaccagctgcgcaagctgctctcctatgtggatgatgaagcctttatccgtgatgtggccaaagtgaaacaggttcggggccccgcaacctggtaccctgcctcagggctagcatttggagaggacaggaaggggtccgacggctgggacccatctctcctaccgggccgtccgtggtgggaggctgtctgctgtcatgaagagattgctggcaatggttaataatgtcagccttggtgcagggtgagggaagccgttcatagcatctgctttcctggtctacctgagggggaaacaatgagattgtagggttttttgaagctgaagcccctctggtgagccctctgcctcctcaatctgtaggaaaacaagttgaagttctctgcatacctcgagagggaatacaaagtccacatcaaccccaactcgctctttgacgtccaggtgaaaaggattcatgagtacaagcggcagctcctcaactgcctgcacatcatcaccttgtataaccgtgagtggctgggacccacccgacccggtccccagggcctggcctcgcccagagtaccaccagtggcatcttctgggggctggtgaccacccttagaagatgtggtattcccacatcttagtttcatttccttttgctgtcataagattctccaacaaaagcacttggggaaaaaaggggtttgtgtggcttagcattcccgatggcagcctgtcctgtggggaggtcaaggcagcaggaacttgaagcaactagttacactctgtcttcagtcaagagcagagaatgagagcagtggattaatgcatgccagtggcactccctgccccccccccccccccccgaggtaggatcttactgtgtagccttagcttgcctggaactgactgtgtagaccaggctggccttgagctcacagagatctgtctgtctctgccttctgagtgctggggctgaaggcatacacgatcctgtcagatcctctggtttttggtttttggtttttttgtttggttggtttggtttggttttggtttttcgagacagggtttctctgtgtagccccggctgtcctggaactcactctgtagtctaggctggccttgaactcagaaatctgccggcctctgcctcccaagtgctgggattaaaggtgtgtgccatcactgcccggtagatcctgcatgcttatataatttttttttacatttacttatttatttcgtgttgtgtgtatatgtgcatgccatgatgcaccacacctgtggaaggtagctttcaagagtaagttctctccttctaccttgtgcgtccttgtgtgtctgaactcagatcgtcagacttggcagccagtgcctttaccttcaactcgcttgctttctccactctcacacagtacagaataccccacttagggaaaagtgtcaccacccctccattaatataatcgagacgatcccttaccgacgtggccagaggcctgcctcccctacacctcatcaggtgattctagagtttgtcaagtggacagcattggctatcacaccccacatcacagaacagaccaaggctcaatgaaggagacccgagaaacacaaaacaaagtgatcagcccatgctggcactgtccatgtaacatccctgactgtggctgcctgtgttgttaagcatccaggcctgatgcttctcttctctacaggcatcaaaagggagcccaataggtttatggtgccgaggactatcatgattggaggcaaggtgagaaacctagggcagattggccctgcaccttgaacatatgcctgggcagtcacaagatcaaggtgtgggaaggagggtgaaacactgacccccagactgccccacaggctgcacccgggtaccacatggctaagatgatcatcaagcttatcactgccattggggatgtggtcaaccacgaccctgcggtaggagaccgcctccgagtgatcttcctggagaactaccgagtctcccttgctgagaaaggtgggtgcggcagtggctgcaggggagctctggctggctcagtgctagaggagactttagccatcttttcctggcctgtggtcagggtaaagaagaaatgggagggcctggagagatggcttcatggttaagagcactggttgttctcccagatgatctgggtgttattgccagcatccacatggcagtttacaaccttctgtaactgcagtctaggtctgatgccctcttctggcctcttcaggcactgcatgcatgtggcacatatacgtgccggcaaaatgccccatccacaaaaataaaacaagataaaataaaaattatttaaaaaataataagatggaaaatgaccgaggaagactacaccacacacacgcacacgcacacacacacacacgcacacgcacacacatgcgtgcagacacacaccatgcatgtacaaggaaaacaaataaaacctgaaaaaactatatcaatgaaaagatcacacagtgagtttaaggctagcctggtgcacacagggagttgcaggttagccagggctagatggtgaaaccgagtgccaaacaacaaaggcagcagagggaccgggtcaggttgggatctatgaaaggctgggttgaaggtgagagactgggatggtaaactctcataggtctgggccctaactcagccaggcagggctcttcccggggctgactttgggtttctgctgccaccccacagttattcccgccgccgacctctcagagcagatctccaccgcgggcaccgaggcctcgggcactggcaacatgaagttcatgctcaatggggctctgaccatcggcaccatggacggtgccaacgtggagatggcagaggaggcgggggaggagaacttcttcatcttcggcatgcgagtggaggacgtggaaaggctggaccagagagggtatgagggcaggagtgccagagtgaatggctcacagtcaagaggcatgctgggggagactgtccggcctgtgtcacatcttagttatggttgctgggacactgggacactggcaagcaaggttaaagagaggagaaagaaggaagtgacaatgggagggagggaagacagttggatttaatatcgttgtgaaattggaggtaaaatgaaatcattagttttctggacgctgcagcagaaagggacaaagacttacagtgctaaagtgatccttcaaagcaaacactttcttatcattacttttttatttatttgtttgtttttcaagacagggtttctgtgtgtagccctggctgtcctggaacttgctctgtagaccatattttcagtttacttcatattttagatttacttattttattttatatgtatttatttcattatgtctgtgtaccacatacatgtctggtgtctatggaggttagaggaatctctaattacaggtgcttgtgagatgccattggaaacctgggtcctctgcaagaacatcaagtactcttaaccactgggccatcttgccagtccaaatgtgatttttattttttaaaaaaatatttacctttgttatttttatttatgtttatgttgggggcctatgtgagtgaatgccacatgtgtacagaagccagaagatgtagactcccctgaggccggagttacagatggttacgagctgcttgtgtggatgttggaacagagctcaggtcctctgaaatagcaaatactattaaccattaagccatctctctagtctcccactgtgaaaaatttaaataaggataatacatgggtgccacttaaattacatcaaaagtggtcccacctttgggatgacagagcaaagagaccagtcagcctagcctacacacacacacacacacacacacacacacacagagatacatgcatacacacatacatacacacacacacacacaggcccccatatttgtaaatgtttatatagtgctccatgctacagtcaagctagatatatgtatttttaagattttattatatatatatatatatatatatatatatatatatatatgacgagtacactgtagctgtcttcagagacaccagaagaagtcatcagatcctattacagatggttgtgagccaccatgtggttgctgggaattgaactcaggacctctggaagaacagtcaatgctcttaaccactgagccatctctccagctccaagctatatattttaaaaaatgtttttaaacttatgtgtatctgtgttctacctgcatatgtctgtgccctatgccatggggccaaaagagggtgttggattccctagggcaggagttacaaacagcggtgaactgccatgtgggtgctgggaattgaaccctggtctcttttttttttttttttttttttttttttgatttatttatttattatatgtaagtacactgtagctgtcttcagacgcaccagaagagggcatcagatctcattacgggtggttgtgagccaccatgtggttgctgggatttgaacttcggacctttggaagagcagtcgggtgctcttacccactgagccatctcaccagcccgaaccctggtctcttgaaagaccaacttttcgtggctgaggcatctctccagctcctcagccaagctatagtataaccaattctaaaccccagggcattcaaattgaactgttgaaaatgttactgcagggagcaaactttccaatcaatgcccagttgttggattattccattgagaattattagggaagccaggcggttgtagctcatgcctttagttctagtacttgggaggcagaggcaggattgtcgctgttgagttcaaggtcagcctggtctattcagcaagttccagaacatccaggccaatgaaactctatctcaaaaagaaaaaaaccaaaaggatattaggctactgcccagtccactgctttatgtagtgtgcaaaacacactggtctttcttttgatcttttggtttttcgagacagggtttctctgtgtagccctggctgtcctggaactcattctgtagaccaggctggacttgaactcaaagaattgcctgcctctgcctcctgagtgctggtgtggtttttatgatgggggtggggtgagtttagaataaatattagaaccaaaaacgttcttgggccaggcatatggctcagtagagcagagtgcttgtggacaagtctgatggcgtgagtccacgtagaagcataacacaagcgtgtgtaatcccagcaagcctgcagaaaaagggaggcacagatgggtgactggaggctcggaagctggcaggctggctaacctgatttacacagtgtcagagaccctgtctcagaaacaagaaagaaaggtggtgaaggcccctggagcttgtccttcctggtgaggcatgctcacacccccacacagagacaaacgccagggttcctaagtctctggcacagagtttctgcgcttctggaaggttggtaccagtttacacttccaccaacagctccagagagctggcatttactgctgaaaggtttttttttttttcctagaaatttcagactttgaatggggcacagtggcgcacaactttgactctggaggcagaggcaggcaaatctctgtgagtctgaagctatcctgaactacatggagtgttctaggtctgacagggctatgtagtaagaccctacctcaggaaaaaagaaaggaaaacacacacacacacacacacacacacacacacacacacacacacacaaatcaataaaagaaatatcagatttagattttgtcttctgggcccaaaggtgcattgagtgagatctgggatgttcaagactccagacttgaaaacagtatgactgcagaggacagggtagcgagccaggtagagactgtgccccggcaaagagagtcacaaagcagggcaatacaaggacctgcggatcactgcggagagagaaactctattgttgaccagaaggggacagagtcagggagtgagggtaggccatctttgtgatgggtttaagatagggggtgagtggacgttgccttgaaagcgagggaaagctggtaccagcctgtaatgagcttggtctgattgtgggaacttagaggccatgtccaaggatgtgcctgttagagatgggtttgggacaatggacaaagacattcatggaaggtttggtttggttttgtggtggagctggggatggaagccagggccctttacataccaggcaagcactctgcttgacttccaagcacttggaagatgagtccttgctcggagtcttgaaaaccaagtcttgtctttgtatttcctttttttgaatgaaattagggatgtgtatgtttgtgtgtgcatgggtgcactgagccatctctcctgccccagattcgtcttttgtcttctctgggcctgagtgtttctatctacgaagtggttgggagagctacagtgcattggagctggggaggccctgggcctcaggtcttcccagcttttctctgggaagctggggacccctttgtggggagctgattacaggtgcgctctggcaggtacaatgcccaggagtactacgaccgaattcctgagcttcggcagatcatcgaacagctaagcagcggcttcttctcccccaagcagcctgacctgttcaaggacattgtcaatatgctcatgcaccatgaccggtgagctgctggcgaggctgcgtggggcgcaggcatggggctcatggaggaacagggcttgggtgggccggaaggctcctgccgtctgctgcgcctgcgccaaggacctggcctttgacctcacagagctctgctctctcctttctcctctaggtttaaagtctttgcagattatgaggaatacattaaatgccaggacaaagtcagtgagttgtacaaggtgaggggtccagcggccaggggctggcagggctttgactctggccgggatgagggagagcggtgccagcctgctggcagaatgaacctagagctttccttgctgtctacagaacccaagagagtggacacggatggtgatcaggaacatagccacctctggcaagttttccagtgaccgcaccattgcccagtatgcccgggagatctggggtgttgaaccttctcgccagcgcctgccagccccagatgagaagatctgagcttccacatcagaccccatacccgcccttgagtctgtttgcaattcctgggatcaggcccactccaggaggtgggcctctggaattacatctctaccctacccactttggaacccactttccccagtctctaggtcctgatgcctagtgtgatgaagaccttgccctcttcatttccctcaactccctactccttttatgtatggatggggtctaaccaagtgcacccactccccaataaatcgactcttcctgctcttccttactcttctctgttgcaaaatatttttagctcttggagagcttaacagctgctgcgcagtcatctccttaccgcccccccagcccccccccacacaccgcggcaggtgcatcctctgtggggagagaggggcggcccataggcggtgtctgggactcagtcccttttccggtgtcgccctccacgcctctcttcccagcgctgtgtccatactaggtcagcggccagcttagttggtcgggggcggggcgtctgtctgggtggggcccaccgggttagggagtcggtactcgggccgaatcctcccggactacggagctttccccgctgtctgggggagggtctagaggaggcttggcgccttcttggctccgcccctagccccgccccactgcggcgttttagggtctcttagcaggtggctaaaataaattcaaaaccaggggagtgttagggcttagggcattcgcagatcgtttaggcgagaacagtggtatattcccggttctggagaaactgaggtatataaggggcctcttctgagcctcacataaaccaagattgaagtgcagaggactgcttccctcgcccaaggcaaggaggggcaatcctcggaaggggttttgcggccctgggtttcatagtgagtctaaacggccggaaactgttacctatccctaggctaggtgtgagggacataactgcttgtggctgcccctcccaagttcctcgtctcggcccatgcatccaaggcttccagttccgaaactgcaaagcacctacccaatttatagacgcctctttctctcttgcccagtggggtgtccctcgccccatctctagacaacgaacctgggttcccagggagccgcgtgttcgttcattcattcctggctttttgaggctccactggaccaaaaccagctcgcattctgtcccagcccctcccccaggccatcgcaaggatccgcagccccacgcccgcgacctccaccacgcccgggcctccgccgcccgcaggaagacgcccgggcccgggcagggtgaaccccgtgggaacggtttgtctcgaaaacaggaacccggaccggggggctgggcggggcgccccttccccaccgcagtccgcttcctgcccctcccggcttcctccgtgcgacacccaggcggggcgcagagcccgggggtgtcgcggtgggggagggctgctgcacgcggtccccacaccaacagtggcgcagccccccgcccgcggttaaactctctggggcggcaggggaggggttaatatgcttcagggcccggcgcgcgcggggcgagagggggagtccccggtggaggaggcgcggcgcggggtgcaggggcggggagggggcggggcggcagggcgctgggccgcggcgcggagaccgggtgggagccgcagccgcagcgaggccggcgggcgggagcgcacggaggtggcgctggccgggcagggttcggggtccgcgctgcgggtcccaagagtgagtgagcgagcacgcgcgcgggtggggcgtgggacacagagggtgcggcccctagggatctcctaggggcaggctggcggggactgcgggtgggtggggaatctgcggtcctgggtgggacagagcttgcggaggggatgaggcacttagagccacccgcaggaggggggcgttcgaggcattccggtgctcgcctgaaacgtatctaccaggctcttccctgcaagtccccatttgacagatgggaaaattgaggttcagagagactaaatgattctcaaggtcacccagcaaggaagtaacagtcaggagggaacgactctgagaagtcctcgggaggattccctaatgtaggggagtctgtgtaagggcgaggtccctttccttgggacaaggttttggcgagatccaggaatgtaaagaaccccaggctttggggctgcgagccctggagcctggttgaggggggaggggcggcagaatgggtgtgtgcgcaaccagggggtatgtggatgcgtgtgggagtgtacatgcgtggagatgcactgtctttgcgtgtgtgcacacgtgttcagatgtcagagctactgtgatcgagagatcagaggctgagctggttcaagtgaacagaaggtctgggaggtgaactgcattcaggtttgcattctgaagtaaaggacttgggtatgtgtggctgaggattttcattgcaggtgtgcatgggatgtgggtgccattgtgtgtgattaggacgggaggtgtctatgaccctggtgtgtgtgaaaagggtcttcttgcacttaatgtaggtcattggccttcggcaaatacctagtctagagaataggtgtttgttcctgcatgggtgcttttatagtccccactgatgaccaggattattaatggtgtcatgcaggccatggcgctagcggccccttctgggctccctactcggtgctctcacgcacaatttaactatgcagcagggtgggtgggaaggcgggagcccaggttgggaagatatatggcaattctggaagggctaggaccggactcctgggaccttagtacttgtgggttgggagtccgcggttcccaggctttggcttcccactgacatctcccaaccgcagtgggctacccctcccaccccccgccccaggaatgttcttctctctagccctcctccccaagggcaggcccctgggggatgctacggccccgcctcccactcggggagcccaggagggggagatgtaggcaggactcctgggttccctcctccctccttccatcccagggagaaattcctccgaggtcccctcaggcactgggttcccaaaataaccctgcgggggaagggaggctgtgaagggaggggaagcgggaggagtgcagagtcaagctgtggggtgttgcaggtgcctgtggggagcaaatgcaaggagaggagggcccgccaggaggcttggggcactaactaacccctggggtcctggctcgtcccttattctcgtagaacccttctaacctcccgcgactccgcgggtgggccggaagcctctcagctagtccatttcccaactagcgagttgcaccatcccggggcaggaccgtttaaccctagaggggcaacggcaggcaactccgcccatgcccagcagggggcgtgcccactccgccccgttcctacgcgccgagccgctccccccacctcccgcgcctctgctgactcccacttctcccaggacaggggtccgaattgagcaccgtgggaggctctgagagtgtagcttgggtctagcctactggcaccggcagccatgacgagcactctggacctggacaagggctgcaccgtggaggagctgctccgtggttgcatcgaagcgtttggtgagttgcatgcagcacgaggggtcacacccagctggaccctgaaccagactctaggccagaacctacccaggctcctattttgaagtcttcttaagaaaagctccttgattttgcggagaagtaccccaatgtaccccttgtacagacgtcaaggaaggggccccagggtcccaacactgacctgggaggggcattatctgtctccctgggggatccggaggaactctctatctctagcctgggaactgtttccggcagatgggggttggtttatcgggtgaaaggggtgccccttcccccaacactcaggaaatgacctctggattcttgaccccggggaacccaggctccttccgctccagctggttcccctcctgacgacgggcttggtccaagctctcctcctccagcctttggatcctgtggtacccctcatccacccagacttatttctcaattttcactcctggctttggagtgttgggaaatgcagtaggtgggtgaggtccggagtgcagacccagggacctgtcaccagactgcagactaggcatctgtgcctccggaccaagggtcagctggcttcttttggacttttggagcagatgactccggaaaggtgcgagatccacagctagtgcgcatgtttctcatgatgcacccctggtacataccttcctctcagctggcttcgaaactgctccacttatatccttgatggggcatggctcaggctctgttgtccacgagtccattctgcttggcttgctcaagaccttagaacatagagtgcagaccctacctatatcacacaattcagacactgatcagtcttctaggacctaggctttgccctgtgcctaactgaggacttgggctctcctgttacctaggccttggcctcattctcccctaacgtcttggatcagcccctgctctgccccagggcctcctctccatctatggtgaaatccaaccctccgcctccatcaatactgcctgcccccagagttgacttatcagttccccctctccccatgcattctcctgggttcaaagcatcccatgcgtcagagcccaggtcccttcccttgggtgcgcttccgctcctcttcctaaccataggttcccgtctgttgcccttaaccctcctttacctatcagcaatcccggaaggacaactccaattctctacagatgaaaacgtgtcacttggtcaggtgagtctgggccctggctcctcctcttgctacccttttgaagcttcgtgtgggctgtaggagtggacagacagcattgaggggacctaccgtgtgggtttaccggggaacactgtccatgtgtgctgccggcctcggtgtgtcccgcttgctgttgtttctgccggggttgtggatggagaagaagcagaggtctgggatgaagggtggggtgggaatggctgcatttcaccacagcacactgcaccctgggatgctttccctctgctagtgagcaccgtcctgtatgtagtttcttcccctgtccacttgagaggactttcactgtgcctgcctctccaccaggtactggatctcagccttcccagcagagttcgacttgaacccagagctggctgaacagatcaaggagctgaaggctctgttagaccaagaagggaaccgcaggcacagcagcctcatcgacatcgagagtgtgtgcgtgggggcggagcgcaaggggcactacgcatgctacaccatatgtgcttaataaatgtctgttcaattgaatgagtgagggtcatgtcactctcttgctttaaaacctcccatggccccctggctccttcagagcactcgtccagctgtcagggccctttgtgacgccaggccagcctgacattcctgccctgtctcccgcacacttcatactgcagctcctggggtctgctcgccattgtctgtcctgcatccttcctctccatggtgctccctcttgttgccatgtctcctccattctcaccagactcagcacaagtgtgaagtccctgctcagcgagggtgctcctctcttgcagagcagaatttgccattcttgccttacccccagatgctctgggcagactcctgttcggtgacagtgtgtttctgtgtctgtctcccccattagattgtgagctcctcgggggcaggcaccgtgtcttgctcatctctgtaccccagcgcctagcacagcgcctggcacagagtacgttgtccatcagtgtgtgttgagctcgtggtgaaggggacacgtgagggagttgctgggaccgggggatgttactgcttaggatggtggctcctgctgtttgggtctcaagtcagtttgagtggcatgtctgagtgagagtggggtcacaggaagcaggggacatctccagcacagggctcactacccctgcccccccagccctacctacaaatggaagcggcaggtgacccagcggaaccctgtggaacagaaaaagcgcaagatgtccttgttgtttgatcacttggagcctatggagctggcagaacatcttacctacctggagtatcgttccttctgcaagatcctggtgtggcctgaaggcttgtggtcggggtgcagtgtgggctgagaaggggaaggggattccaggaagggctaagactgggtggggggggggttggccccagggatggttgggcggtttcatcaaatgacagagggagggtgagcaaggcagacagtgatgggagaggccaacagggtgctcaggccaaccccacttgtccccagttccaagactaccacagctttgtgactcatggctgcaccgtagacaacccggtcctggagcgattcatctccctcttcaacagtgtctctcagtgggtccaactcatgatcctcagcaagcccacagccacgcagcgggcgctggtcatcacgcacttcgtgcatgtggcagaggtgcccacctttcccgtgtgcccagcctccgcgtgtctatcaagccccgccccttctctcctaagggctgctgggtgacatgtcgcctcccctctctatttgccttccagaggctgctgcagctgcagaacttcaacacgctgatggccgtcgtgggaggcctgagccacagctccatctcacgcctcaaggagacccacagccacgtcagccctgacaccatcaaggtgcctggtttcgggaggggcctgtgcttcacagctgcggacttcgcagtgcagtgctgaggtctaggctcgctcgactgttcttgtctcacagataaggaaactgagacgtgaagtggggagcaaggtctttagctgtacaatgcaagtgtccgtggtggctcccaggcctgcttggtcccaaagctaatttcttcttcttattttattgtatgtgtgtttgtatagtgcatgtatgttcacgggtgcgtgcaagagaccgaagcgtgacattgactgtcttcctctgaactccatcttatccttttaaaatccagaagtttaaaaaacattgctgagtcttaaaggatgatccgcgacctctgcccaagcagcagggctcagggtcaaaacctccgggatgagaactctccttttctcccgagctttattgtgtgtgtaccccagagcaaaactctgggggctttttgttgtccatttccgccgtcctccgagtagatacacgcaggattttctgtctccgatggtctcattcagcgtgggtgggaggagcatgaatgggaggagcttcccagtccacgtgatgggaggagctttccatcctgtcctgtggtgatcttttttgttgttgttgcgtgttattgtctgtcctaatttagtatttgctgtattgtggaacattggagggttttcttttttataaattaacttatttagtgtgtgtatatgtgcccataatgggtgtgtacatgtgcccataccacagttcttgtgtggagctcagaggacatcgtgcaagagtctgtttttttccttttatgatgaggaccctggaggttgaaccaggtcttcaagcttgatgccactcggtcattttgctagcttcctccctccattcctccctcccttcttcctctctctttttctttatttttctctctcttttagattcaggtatcactgtgtagccccggctgtcctgaaattccctatgtagaccaggctggcctcaacgtcacagagtccacctgtctctgcctccccagtccacatcagggtcttttttctttcttctttcctttcttcttcctttctttctttctgttttttgtttttttggtttttttggagacagggtttctctgtatagccctggctgtcctggaactcacatcagggtcttgtttgtttatttttgggatggggagtctcatatattccagactgtccctgaacttgttgtttacctctagtcagagaccttcaccgccaccaactgaaccgagttacagctcaagccttccttttgaacctctcccctcaatcccaaccactgcttggttttctggtttttcgagacagggtttcactgtgtagccctggctctcctggaactcactctttagaccaggctggcctcgaactctgaaatccacctgcctctgccttctgagtgctgggattaaaggcgtgcaccaccacgcccagcagcccaaccactttttgagacaaggttttgctgtgtaaaatcttggctgcttggtactcactatgaagatggggcgggttttgaatttatagttatcctcctgcatctgcctccccactgctgggattttgggcttatgtgaccaggctcagcttaagcttttttcccagtgtctgccatcaccaaacaccctgcctagtaacatccttcttgatcagtaggctggtgtttaaatgttgataacctgtgctcattcctggtgcgtatatgtatgcatggtagctggtcctagttgttttcttggactcatgacctgtgagctttgatccctggagtttgagagagcagtgttgggagctgatagggaggatttgaccttcttgcctatcttcggccttgcccccatcccttcccacagttccagggctgaagtgggaggatggttgagtggtgtgggtgagtgacactctgccttttccccccacctcttaccccagctctgggaaggtctgacagaactagtgacagctactggcaactacagcaactaccggcgcaggctggcagcctgcgtgggcttccgctttcctatcctgggagtgcacctcaaggatctagtggctctgcagctggctctgcctgactggctggacccaggtcggacccggctcaatggagccaagatgaggcagcttttctgcattctggaggagttggccatggtgaccagccttcgcccacccgtacaagccaaccccgacctgctgagcctgctcacggtgaggggctgggcagcatggctgcatttgcatctgctgtggctgtgtgcttgctgggttctgaggtttcccttgggctctgtttggggcttgctctggactctgatgtgatttcaaggttgggctgagacctgggcctagggtctggtctcaggagctgttaatgtggttcataggcttagtctgaggctgggcctgggtccttgctcctggtagtggattatattcgaaaggcaggactaacctttggatttgtgggtgccatggtgatttctttctttcttgtttttaaagatttatttatttcatttatatgagtacactgtagctgtcttcagatacatcagaaaaaggcatcagatcctaacagatggttgtgagccaccgtgtgtttgctgggaattgaactcaggacctctggaagagcagtcaatgctcttaaccgctgagccctgacatgggtgatttctaacatggccctgggctcctgagtgaggctcttttagtatttacttgttttgattttgagacaggatctcacttggtagcccagcgactcagacctactaggaagcctaagctaaccttgaactcgtggaggtctttaggccaggttctgacgctgcgttttggctgatattttggcaacgagttgtgtttaaagttggctctgtgggccggctggcacggaagtggttgcaggtgttttctagctggcctttgacctgagtctagctctcacatcaggctctgggcagactggtagtcctgtggccctgagtttgggactcctgtgtgagagaggaacagggatcagagggtgtgagcagacctgtgtgtcgccgcaggtgtccctggatcagtatcagacagaggatgagctgtaccagctctcactgcagcgagagccacgctccaagtcgtcggtaagggagccccttccccatcaccccatcactgcactttagtatcctaggatgcaaagacaaaaccccacccactacacttgcctgacaatggaatgctgggggttggggtggctttgggcagactctctttccatttactcgagccttagattcattcctgctctggccctggctcagacctaaccctcttccacagccaaccagccc

SEQ ID NO: 320 - DNA, 2858 bp, Mus musculus
cactccctggttggaggcagctaggaggccatcatctgtccagttcggcccaccctctcacagccatgtccaggcctctttcagaccaggataagagaaagcaaatcagcgttcgtggcttagccggagtggaaaatgtgtcggagctaaaaaagaacttcaaccgccacctgcatttcaccttggtcaaggatcgcaatgtggctactccgagagattactattttgcactggcccacactgtccgggaccacctcgtgggacgctggatccgcacacagcagcattactacgaaaaggaccccaagaggatctactacctgtctttggagttctacatgggccggacactgcagaacaccatggtgaacctggccttggagaacgcctgtgatgaggccacttaccagctgggcttggacatggaggagttggaggagatcgaggaggatgcagggttgggcaatgggggcctgggacgcctggcagcttgctttttggactccatggccaccctggggctcgctgcctatggctatgggatccgctatgagtttgggatttttaatcagaagatctgtgggggctggcagatggaagaagctgatgactggcttcgctatggcaacccctgggagaaggcccgcccagagttcacgctgcctgtgcacttctatggccgagtggagcacaccagccagggtgccaagtgggtggacacacaggtagtgctggctatgccctatgacactcctgtgcccggctatcggaacaacgtcgtcaacaccatgcgcctctggtcggccaaggcacctaacgacttcaacctcaaggacttcaatgttggcggctacatccaggctgtgctggaccgaaacctggccgagaacatctcgcgtgttttgtaccccaatgataatttctttgaagggaaggagctgcggctgaagcaggagtactttgtggtggctgccaccctccaggacatcatccgacgtttcaagtcctccaagtttggcagccgtgatcctgtgcgcacaaacttcgatgccttccctgataaggtggccatccagctcaatgacacccacccctctttggccatcccagagctgatgaggattctggtggacctggaacgactggactgggacaaggcctgggacgtaacagtgaagacctgtgcctacaccaaccacacggtgctgcctgaagccctggagcgctggccagtgcacctcatggagacactgctgccccgccacttgcagatcatttacgagatcaaccagcgtttccttaaccgggtggcggctgcattccctggggacgtagataggctgcggcgcatgtcactcgtggaggaaggagcagtgaaacgcatcaacatggcacacctgtgcattgctggctcgcacgctgtcaacggcgtggctcgcatccattcggagatcctcaagaaaaccatcttcaaggacttttatgagctggagcctcacaagttccagaacaagaccaatggcatcactcctcggcgctggctggttctgtgtaaccctgggctggcagaggtcattgctgagcgcattggtgaggactacatctcagacctggaccagctgcgcaagctgctctcctatgtggatgatgaagcctttatccgtgatgtggccaaagtgaaacaggaaaacaagttgaagttctctgcatacctcgagagggaatacaaagtccacatcaaccccaactcgctctttgacgtccaggtgaaaaggattcatgagtacaagcggcagctcctcaactgcctgcacatcatcaccttgtataaccgcatcaaaagggagcccaataggtttatggtgccgaggactatcatgattggaggcaaggctgcacccgggtaccacatggctaagatgatcatcaagcttatcactgccattggggatgtggtcaaccacgaccctgcggtaggagaccgcctccgagtgatcttcctggagaactaccgagtctcccttgctgagaaagttattcccgccgccgacctctcagagcagatctccaccgcgggcaccgaggcctcgggcactggcaacatgaagttcatgctcaatggggctctgaccatcggcaccatggacggtgccaacgtggagatggcagaggaggcgggggaggagaacttcttcatcttcggcatgcgagtggaggacgtggaaaggctggaccagagagggtacaatgcccaggagtactacgaccgaattcctgagcttcggcagatcatcgaacagctaagcagcggcttcttctcccccaagcagcctgacctgttcaaggacattgtcaatatgctcatgcaccatgaccggtttaaagtctttgcagattatgaggaatacattaaatgccaggacaaagtcagtgagttgtacaagaacccaagagagtggacacggatggtgatcaggaacatagccacctctggcaagttttccagtgaccgcaccattgcccagtatgcccgggagatctggggtgttgaaccttctcgccagcgcctgccagccccagatgagaagatctgagcttccacatcagaccccatacccgcccttgagtctgtttgcaattcctgggatcaggcccactccaggaggtgggcctctggaattacatctctaccctacccactttggaacccactttccccagtctctaggtcctgatgcctagtgtgatgaagaccttgccctcttcatttccctcaactccctactccttttatgtatggatggggtctaaccaagtgcacccactccccaataaatcgactcttcctgctcttcctt

SEQ ID NO: 321 - protein, 838 aa, Mus musculus
MSRPLSDQDKRKQISVRGLAGVENVSELKKNFNRHLHFTLVKDRNVATPRDYYFAHTVRDHLVGRWIRTQQHYYEKDPKRIYYLSLEFYMGRTLQNTMVNLALENACDEATYQLGLDMEELEEIEEDAGLGNGGLGRLAACFLDSMATLGLAAYGYGIRYEFGIFNQKICGGWQMEEADDWLRYGNPWEKARPEFTLPVHFYGRVEHTSQGAKWVDTQVVLAMPYDTPVPGYRNNVVNTMRLWSAKAPNDFNLKDFNVGGYIQAVLDRNLAENISRVLYPNDNFFEGKELRLKQEYFVVAATLQDIIRRFKSSKFGSRDPVRTNFDAFPDKVAIQLNDTHPSLAIPELMRILVDLERLDWDKAWDVTVKTCAYTNHTVLPEALERWPVHLMLLPRHLQIIYEINQRFLNRVAAAFPGDVDRLRRMSLVEEGAVKRINMAHLCIAGSHAVNGVARIHSEILKKTIFKDFYELEPHKFQNKTNGITPRRWLVLCNPGLAEVIAERIGEDYISDLDQLRKLLSYVDDEAFIRDVAKVKQENKLKFSAYLEREYKVHINPNSLFDVQVKRIHEYKRQLLNCLHIITLYNRIKREPNRFMVPRTIMIGGKAAPGYHMAKMIIKLITAIGDVVNHDPAVGDRLRVIFLENYRVSLAEKVIPAADLSEQISTAGTEASGTGNMKFMLNGALTIGTMDGANVEMAEEAGEENFFIFGMRVEDVERLDQRGYNAQEYYDRIPELRQIIEQLSSGFFSPKQPDLFKDIVNMLMHHDRFKVFADYEEYIKCQDKVSELYKNPREWTRMVIRNIATSGKFSSDRTIAQYAREIWGVEPSRQRLPAPDEKI

SEQ ID NO: 322 - DNA, 34371 bp, Homo sapiens
atactgtccttgccacttacagtccaaagattttccccaaagaatagacattttttcctctcatcacttctagatgcaaaatcttttatttttttcctttctcacacacaccccagacccctaacgttaagccagcttccatctccccattccacacgatcttgagtagcacacgttatggtcggttcctccgaagagtgttgtattagggtctgagaggcagaggggctgggaaagacttgttatagtccgtgtgggaatgagagaagtcggtgcagaatagtaaacgggagtctgtttcccacaggtccccttcccctgagcccatctacaatagcgaggggaagcggcttaacacccgagagttccgcacccgcaaaaagctggaagaggagcggcacaacctcatcacagagatggttgcactcaatccggatttcaagccacctgcagattacaagtaagcggaggggctcggtcatctgggatgaagacacatgcagatcatgggtgacctgctgggatgggacagtattggtactactcacctcttgcctcaagtcacccataattagcacttggtaccaatatttggttttagaaaagccgctggctgtgtcattctccagaaatgtgcggtgacacaggcttttctttcttagacctccagcaacacgtgtgagtgataaagtcatgattccacaagatgagtacccagaaatcaactttgtggggctgctcatcgggcccaggtgagtaactgctggtctataggatatagaattcctttagagcctgtgagatgtgtccgttttgtgcctaattggggactgttggcttacttttcccctttttggtaggacatttcattttggctgaattaatgcctttctgtgagaaggtgtcttaacttccccactagtgcggagaagtcaaatcctcaggtttactgtggctgaccataatatagagttcatggagctcttggtgggaaaatccaattctctgcgcttgtggtttcccaccaatgccaaattggtccagcctctcttccctcttgagtgtgaatttgtcaggtataaacttagtcatttctgcctctctagagggaacaccctgaagaacatagagaaggagtgcaatgccaagattatgatccgggggaaagggtctgtgaaagaagggaaggttgggcgcaaagatggccagatgttgccaggagaagatgagccacttcatgccctggttactgccaatacaatggagaacgtcaaaaaggcagtggaacaggtgagcggtgagcccagaaaggaagcctcctggcagaaacctaggtggaggccctaagcacttaactgtccattgcattttcactagataagaaacatcctgaagcagggtatcgagactccagaggaccagaatgatctacggaagatgcagcttcgggagttggctcgcttaaatgggacccttcgggaagacgataacaggtatgtgatcagtttaaaggagagtgtagagacctgaagaacctatggaagtagagattgttcccttgcattgacctctttttcctttaataggatcttaagaccctggcagagctcagagacccgcagcattaccaacaccacagtgtgtaccaagtgtggaggggctggccacattgcttcagactgtaaattccaaaggtgaggggctggctcttgcggtttcctggtagcctgcgatgtgcaggacaacttttctggcacattcattggttgctgttaatcttaccaagagaaacatcctttctgttagtgtggtctgtaatggtgtgatttaaagcccaggatgattagaaataggctgtacagatacccctgtttgtttgtcttgagcccaagaaaactggaagtttccattttgggtatgtttttactggggctcaataggaaattcactgcttttgctgttcagaattggttcaagaagactaagcaatctctacagatttctgaccagttgcaagtcagcactcgatatcaacactttctgactggctggcgaatatgtaaggttttgtttaggaagttcgttctggcagttgtgccagtcttgcatagattttcctttcctcaaactgggaatgaagtttgatgaaattgacttgagagaacctgtgcttcatcggtgctcagggtctcctgtgctcttcgcccaggggcccctctactctggtgatcccagatgcagaactgggcacgaaactgaagatctgatgagactgttgagagccatgcccagtaaggggttagaaagatgtgtgatgatctggtgattgaattcttcaaaactttccatatgttggttcctcaggataaaagcttccttcttaacaagtttttcccctttctctgtttgtgtcccccaccccacttcaggcctggtgatcctcagtcagctcaggataaagcacggatggataaagaatatttgtccctcatggctgaactgggtgaagcacctgtcccagcatctgtgggctccacctctgggcctgccaccacacccctggccagcgcacctcgtcctgctgctcccgccaacaacccacctccaccggtgagcctgggggctggctctcttggtctggcttccccattctctactgcagagactgggagctatggccacgtggtttgggtagagcagacaatggatgtggatggcaacattgttcttccgggatctcaggccagtttggggacttctcacttcgggaagaccttgttcttgtgttctggtcctgtgtcataacccgaagaacaatgttgccactagggggcgcaggcagggacgttggcaggaaatgctctcacgtagtctctcatgtctaccacccagagccgcccaccctggatgaattctggcccttcagagagtcggccctaccacggcatgcatggaggtggtcctggtgggcccggaggtggcccccacagcttcccacacccattacccagcctgacaggtgggcatggtggacatcccatgcagcacaaccccaatggacccccacccccttggatgcagccaccaccaccaccgatgaaccagggcccccaccctcctgggcaccatggccctcctccaatgggtaagtaagtgtcagaccagaaaccttgggggctttgggataagcaaggggttacgtcaggtcgctgttggctagaagcagctctcaagtggctgggcaatgtgctgggtctgcctggcttgccagggttgtggctctggaaggagcaagactccattctggttcagggagtgattctgtgttgggtaagcacagacctgccttttacaggcatggttttcagaactcgcgtaaggatagcaactgaggttatcacaggggtggcttccctggccagttccaatgtcctgctaagtccctgctctttccttccatcaagatcagtacctgggaagtacgcctgtgggctctggggtctatcgcctgcatcaaggaaaaggtaatggctgtctgctggctgtgggtcttcacctaggcttgggtgagtgggggttctggcccaagtccccgcctttccctgaggcctcatctttgcctccacctgtccacaggtatgatgccgccaccacctatgggcatgatgccgccgccgccgccgcctcccagtgggcagcccccaccccctccctctggtcctcttcccccatggcaacaacagcagcagcagcctccgccaccccctccgcccagcagcagtatggcttccagtacccccttgccatggcagcaaagtgagtagaatattttgggcttgtgggggtgggtgggatgggggtggggctgacaggaaccatagagcctcacacaagcaggcaggtgtcttgggatgagcccctgggctctgctggggttgtaaacagaaagggcctcctggtccagggggtggaggggcatcttgaagaggagagctgatgtttggtgtggttgtgtctggggagaggttcgtgggggcctggaggggagcctgctattgtaggtagggggccagaagtccagaccctcgcaggctgagtgagcggctggctggactgagcctggtgcatatgggtcgagtgggatggtgcatgcttgctctggcaagggctgcgattggggtgagagactgcagaggtgggactgggcagtggggagacagcagctgtggccttgaggttgaatgtgccgttcggtggtggcggcggctgggcggagggacatcagagctgttcttgtgtctggtaccttcccctcagcccttccaggggcattggtgacaaagggcttactctgttaagcccagagacctcgaggctgaccccagggtagtcctgcccacccctccactccccatcaccagccccgcccacccgccccccaccaccgtaccgcatgccaagcaaggagcaggcgcccctcgcccccatcccaaggcagcagccgcagacagccgcggtgtgcccccgcgcgtgtgaccttgggcttctttaccaccccagatacgacgactaccaccacgagcgctggcacagggtccatcccgccatggcaacagcagcaggcggctgccgcagcttctccaggagcccctcagatgcaaggcaaccccactatggtgcccctgccccccggggtccagccgcctctgccgcctggggcccctccccctccgccgcctccaccgcctggttccgccggcatgatgtatgccccgccccctcctcctccgcctcccatggacccttctaactttgtcaccatgatgggcatgggggtggcgggcatgccgcccttcgggatgcctccagctcccccaccgcctccaccacagaactagacttgttttttaagaaaatatatattatatatagagagaattggtctcgtttaaacacgccgaacctcaccatatggagccagacattgggacgcacgcatgtgattgtgtgtgcacgcatgtgtgtgtgtgcacgcactgggctgggccaagcgactgaggattcgcttgggaacgggcaggtggtagtaggggcgccagcttgggctctcctggcgccccgtagcatcgagtgtcttctttgtcttctttctctcctcacccaactccctttgcctctccccaaaccgggccgccaggatccctccccgcggcggcgatggcccgagccatgagagtgaggactttccgcgcccattggtgacccttccaggcagacagcctcagcaacgcccctggtggacaggatggttcggcaaagcagcctgagttatttttgtggacggaatcggaacacgctggctccatatcgtgaaatttttattaatttttttctttttcctttgttacttctttatcttttcctttcttcagactccgtccaaggagatgctctccccggtcttctgctgcaatttagattcctttcccttctctccagttctccttcccttaccaaggagaggggagcaaatggttttgggcaagggctttggccattcatgtcaagctggttgtgggtttttcaaggtgccatagccacccccaaagatgtttgtttaaagcgtggggttttttaatctctgccacccttgtcaagggagtcttgtaaagttgccgagggtaggttcatctccaggtttcgggattcccatccgtcctggcgatcctgccagcagtgggtgggcagcctgagctccctcgggctcgcctgccagcctggagttcttcctgtgctccttgatcacctgagctgcctcagattccatttggtcctctccttcctggaaggcttccttttatgttttgttttaatcccaaatgtctgaatgttttgcagtgtgtaggggtttgagccccttgttcattctccttcctttttcctcccgcttccctctccatgaagtgattctgttgacaataatgtatactgcgcgttctcttcactggtttatctgcagaaatttctctgggcttttttcggtgttagattcaacactgcgctaaagcggggatgttccattgaataaaagagcagtgtggttttctgggtctgcttctttattttctttttaatgcctgccccgcccggtttttcttttcacataaacttcctctaccaccagcagcagcagcagcaccaaaggtgccttaactttcgttcagcaccaggtccgggggggtgagactgtgggtggttaattagggaagcccaccacctgcctcctgtgtgtggctttggtggtgggagctcagtgtgtgggtggctccacagtctcccctttggtgactagttaacatcgctgagaaccaattttgcccctccttgttcactgctcatttttctagtctctgtcctttgaaggctttttcctggggctcagacgtccacgtttgatgagctccagtggtgatttgtgcctggaagctgccacctaaggccctgggcctggggaggcatcaacactaaaggtcaagccaactaatcctgcctgtcaggcacagagcagctaaaattaaaaccgccaagtggcttttttccttctctgctggtgacttgcagcctgccagcgctgtaggctttggcgggggtcggggggacaggataaagtgccccatcttgtgctttgcaagcacttttcaaagggtcttctgctttttttccatgtcttgggcggcgagtgggtagttactgttagggttccagaaaaatccatgtggagtctccaccaggtagtgaggtcctctcctgggcagaggtgccttagagctgccctggttccacctgcctctccttccttcagggcggctgagggacagtaggctcccccagcatctggctgctggggccagcaactggcctgggctgctttccagctgtgagctagggctggctactgctgtttactggggtgtctggtcccccgtccaggaggcctgtgctttgctatgggtctgccaggcttgaggagccctcagaagcaaggcaggctcagtgcgtttccccagccaagccctaaacttcggctcaccaaaaggaggacatcttttttgcctttgtccttaagtggcagaatgggggcagggcctggggcctggctaccctctttgaccttggcttcacctcattgcttctcccacaagcttggtttccctggtgggctcattgggtggttaattagctctttgaagctctggaagcggcaaagtggcgctatgtgggttttagaaataaaatcaataaatgacttaaccacagcttagctatctcctccgcttctctcccccaggccagctccattcctgtgctccctccctttctgctccctgccgtcagcttttgttaaggttttggagaggaagtggctgactaaggcatcagtctccaaggtgctagaggccctgaaatggaagagacagcaggaaggcttggccctctgaaccgtggcaagcacttgcctctggcagaatcagagagagaaaggcctgcccacctgtcttaagacacctggggtgggaaagcaagccatttactccatcacattgtgacagggctgtgcttgccccaccccctctcctcacgttcatttctgctgctgtagcagcactgtccccgtccctcaaggcctggcaaggcctggcaagaggaatgccagtggggaaaggtcagcctcagggctctgttactgaggttcagccaagggctctggagaaacccaggattggtccaaggaaggaggccgggtttctagttagaaacttagacataaataacctcgagtgagttcaggttgtaaaagtgcttcagggttcattaaacctgcatacacaacaccaaggaggggcggaggaagcagggaaacagatgagatcgtgctgcccaggtgtgatcatgctgggctggggcatgcagtgtcaccccgggacaaagcctggaaacagtggggagtgatggcatgacaaagacggaaagaagccacagaaaaggtagttggagaaagttaaaaatttcccagtaaaaatgttcctgagagcaagcgccctgggtgcaagaggggagagtagctgggaaaggatggaatgaacttggccttccctgcctgtaagatgtggatggtctatggggatcgggtcctcagtggcaggaacataaagtcttgcaggaaataggggtcaatgcaaagaaggtgtgtgtggccaaagcaggctgccacgattgggctgtgaggtgacggcatggttaacaagctactgcctgcctggcagtggactgccaagaagtctcagctctactcacagcaaccctccaagggacaagtgcgggctgtgaagaaccttggatgccaggccaagctggagtccaagctgtgcttagtggaggatggggatgaggcccaggagctgaggctggggtgcaaactgtgaaaggggaagagaccagacagctgccagcattgtttttttgtttgtttttgagacagagtctcgctgtgtcgcccaggctggtgtgcagtggcgtgatctcggctcactgcaacctctgcctcccgggctcaagtgattctcctgcctcagcctcccgagtagctaggattacaggcatgtgccaccatgcttggctaatatttgtatttttagtagagacggggtttcgccatgttgatcaggctggtctcgaactcctgacctcaggtgatccacccacctcggcctcaaagtgctaggattacaggcgtgagccaccgcgcccggccagcattgttttttaatggtttatgaaacacttcttaagagaaattggaaattaacagaaaaatgtaaggaaaagttgtttgcatccccgtgtctgtggaggtgtattttggtgtttttttcccgatcttttttctctacttggaaatgtggcaggcaccacagaagacagtgtgcccgtgccttttgggggcaggggtagagcagggcttgggagcctggagacctctgtaggacttgaagtttggcccacatactaagccggtgattccagggctgggtctgccatggctcagaaagtgatcggaggccgggcgctgtggctcatgcctgtaatcccagcattttgggaggccaaggtgggcggatcacctcaggtcaggagttccagaccagcctggtccaacatggtgaaaccccgtctctactaaaaatacaaaacttagctgggcatggtggtgggtgcctgtaatcccagctactcaggaggctgaggcagaattgcttgagcccaggaggcggaggttgcagtgagctgagatcatgccattgcactctagcctgggcgacaagaatgaaactctacctcaaaaaaaaaaaaaaaaaagttctcagaaacagcttggctttctccgaaccaggctctcaatagtatcctgcagctgtccaggcttttgacctgcttccttggccttcagaacagaacacccagctcttcccctccaccggcccaccacccgggaggcccaaacagcctttgaactagcacaaggtcctggttcctttctcttaaagaacagcaggatccgaagcctgccctcacaagatgaggaggcagcagctgagaggcagggatttttttttttctcattggagagtctaaatttggtgaaggaatccaaagctcagaaaggtaaagcaaccagcttgaggtcacacagcaagtcagtgctggggccagaacacagcagtgaatgggaggatagccaaagcctccagggaagggctcaaagctgtggggctatgcacacaaatggggtgaggtcctcgaggtacagattaggcacccattttataggccaggtcacagagctggtttacaaaatcctgctcagagtgtggccccaggtggcaggaagaagtgaaagaaggcctctaatcacttcctaagcagtggaatcacagggagaacttactgtcattaaaccagtatgatgatggagtggggaatgcctcagtttctcccaccgccgagggcctataggactacagttcccagggccccgtgctgcaggctagcggcctcccgccaatgctggccagtaacctgagcatccctctccaaaaggtcacttcagggctccttgagggacagcaacagggggagcctagagctgctcagcttcggtgggggtggagtgagggctgtggccctgcctcacacaacctccctcacaccacccctgcaatgcagggtcgtgggcccctttctcaaagacatccagtggcctctgctagttgcacctcttccgtcaggggacactgacttggctcctgcaccacagcctgcagggggtcctggttccttttgccacaacacatggcctcccatcctggttcagccactgacagacagctccccaatccagcactctgcctgctccttcttgtatccaaccctccaaaaggcagggacaagggacagaagaccatgtgcaaggcctggaggaagtgggtcagcacaggcctgtgaacaagccaggccagtcttggcggcccaagtggagctcacctctccctcccctctcctctcctccccttgccctcaaaatagctccctgagctgccaggccaagaccctcccattgcaggggaggcggggcgtgctgcccagagccaggctttaaatccccttgaggctggggagctccactccttggctggaggcagtgctgaggccgccgtcccctctaccatcagtccagtccggcccgccctcctgcagccatgtcccggcccctgtcagaccaagagaaaagaaagcaaatcagtgtgcgtggcctggccggcgtggagaacgtgactgagctgaaaaagaacttcaaccggcacctgcatttcacactcgtaaaggaccgcaatgtggccaccccacgagactactactttgctctggcccataccgtgcgcgaccacctcgtggggcgctggatccgcacgcagcagcactactatgagaaggaccccaaggtgctgctggggagcctggggtgggggtatgggctgaaggcgctgccagggagctggcgatcttgacttaagtggctgcccctcgtcactctaggttcttgggggtggagaatccaggggtgccaggcacaaggggtgctgggacaatctgagggagaaacctggggcaggagtgggggtcagggagctcagagcaggtgggctggctgcaaagggtcagtgcccactcggagaaggttggagtgggtgctggtgggcaggacggcgcctgtggcctggctgggcccaggtggaaggacacatcagttgctgcatgtatgcgcggtgtgcctgtgcagcaggcggggctggggcagctggggcggcagagatcaagtgtccggtggggtcactggtaaatgtcagcaacctgacacgcctcggtggggagtgggggaggggcgggcagacggcccaggaggggacccaggaaactgggagaccaggcactggcagcatcctagtttctggtgcctctgggtctccttgggattgaggcttgagggccaaggggaactggacagtgcaaggatgggaggtgacagtctctagcccagtctctagccactgtgtgaccttgagcaaatgacttttttctctgggccttggccttgccctcctgctcttggaggcgcttccacatgtcctggcacctgctgggctgtgcagggggaaggggtgcccattctcccgagtacctcagtccctgaagtgggtatggccagcgctatttcccagatgaggagactgaggccaaagagagtgatttgtccaaagtcagaggaatgctgggaccagaaccttaaccgctgggccccaaagcctgagacagggagaaacaaattggggacagggatgggactgctgagcagggcaggcgggccagaggtccaggcgtggctgggcctggctgagtgttggtgtgtggccctgaccccattccctgcccatccgtctctctgggcagaggatctactacctgtctttagagttctatatgggacggacgctacagaacaccatggtgaacctggccttagagaatgcctgtgacgaggccacctaccaggtgtgtgtggggtggggcaagccgtggggactgggggattccactgctgacacttgaccctgaccactgtcaccctcactcctccagctgggcctggacatggaggagctggaggaaattgaggaggatgcggggctgggcaacgggggcctgggccggctggcaggtaagaagacagggccgtgagggtggagtgggccgatggggtcctccttgctgggtccctgacagccacctccctgcacacccccagcctgctttcttgactccatggcaacactgggcctggccgcctatggctacgggattcgctatgagtttgggatttttaaccagaagatctccgggggctggcaggtgagcagccttggctctaacttgtggggtctagtcaggatggggaagacccccacttgtttatcatctctggaaaggtccgaaacagccccgcaagctctgtggaaagcatccttgctgctccccaccccccgacccaaagccagctggtgcccctgaaacaggtggtccgtgtcccactcgatagcccagcagaccaggggcccacctcagagctcctgacttatacttggtgtagggtacaccggcccacggcccccaccctgccccaccgtgcactgtgagtgcctgtactgatactgctggcctttctccctgacctgccttgggtgcagatggaggaggccgatgactggcttcgctacggcaacccctgggagaaggcccggcccgagttcacgctacctgtgcacttctacggccatgtggagcacaccagccagggtgccaagtgggtggacacacaggtgaggatgaagctgggggtcaggggagcccagagaaggggagggaagagaaggaagcccagagaggaagcaggacccagtgtattttacacctgaggatgctgaggctcagagaggttaagtgacttactcaaagtcacacagctgaagccaggagagactggagacagggacacaggggagccagcctaagtgcagagtctggaaggggagagaggctgccctgctcccccagtgtctccccatgacctggctccactccacaccatgagatttatcaaaggaccatcttggcgacttgagtctgccctgaacatctcgacagcagcagcccagaaacggggacaggagaaaactggagccttccgaaaggaattcactcatcacacagcaagttagagggatcctaaaaccaaaccaaatctagacacagtggctcatgcccgtaatcccagcactttagaaggccgaggtgacagtatggcttgagttcaggatttcaagaccagcctgggcaacatagagagaccctgtctctacaaaaaataaaaaaaatagactggggcagtgggtcatacctgtaatcccagcactttgggaggccaaggtgagcagattgcttgagctcaggagttcgagaccagcctggacaagagggcgaaaccccgtctacaaaaaatacaaaaattagccaggcgtgatggtgtgcgcctgtagtcccagctactcgggtggctgaagtgggagaactgcttgagcccaggagcctgggtgacagagccagacctcgtctcaaaaaaaaaatttaaaaaattagccagggtgctggtgcatgcctgtagtcccagctactctgaggcttcagtgggaggatcacttgagtccaggatttaaaggctgcagtgagctatgattgtacaactgcactccagccagcctgtgtgacagagtgagactgtttcaaaaagcaaaaagaccaaaaactgaaaaccttaaaaccaaaccaggtgtacaaatcccagtttaggccgggcgtggtgacttacacctgtaatctcagcactttgggaggccaaggcaggtggatcacctgaggtcaggagttcaagactagcctgaccaatatggtgaaacccagtctctactaaaaacacaaaaacattagccgggcatggtggcacgtgcctgtaatcccagccactcaggaggctgaagccagagaatcgcttgaatccaggaggtggaggttacagtgagccaagatagtgccactgcactccagcctgggtaacagagtgaggtcccatctcaaaaacaaacaaacaaaaaacaaatcccagttcaggcaatcttcctgctgaagcttcaggtcatcagcccccagatgggctgcagataaaccactaggctttcagaactgagcatttgtttgttgtcctccaggttaagatgcagtgggggctgctggcagtccatgccaggtgcacgtggcaactggcacaagtggctgtggctggaaggcaggagacctggctccctctggtgctgccagcctggctgtgtgctcggggatgggtcccttccctctctctgtgtcaactcccaccctgcaccaatcagggtgactgaatgtggggagggagggcgatgccccttaaaagggctcgcttagaggagtgaatgtacccctggcaccgtggtagcagacaattattgatgtttgctagttatggaaggcggggcagaattagtcaccgtgaattagccctgtggtcaaccagagatgagacctttggatggacttgacctctgtgaccccttcagcctggccctgggttcccccagccctctcatgagtccacagtgtcctctagcttttgctcaggccaggctggccagcccagcccccattgctgcagagtggtcgccaacagagcccctcctgggttccgggcttatcacctgcctccttccattttcctcaccaccgtctgcccaggcagggcttatgggtgtcggggaggtgttgagggtgtctttgctctagatgcggtccagagagactatggggtttgctcatggttacccagctcatcgatgctagacaaggacaagagcctgggtctgcagagtgcagggataaagccttgagtcccagccctgaggggagggaggcaattgccagggctggccagctcctgacaggattgccccccgcaggtggtactggccatgccctacgatacgcccgtgcctggctatcgcaacaatgttgtcaacaccatgcgcctctggtctgccaaggctcccaatgacttcaacctcaaggactgtgagttcatccactggtagccagcaaccccagcttgcccgccggccacgcccagcgcaggccttaccctgtccccacttttgtccctcagtcaatgtcggtggctacatccaggctgtgttggaccgaaacctggcggagaacatctctcgtgtcctgtaccccaatgataatgtgcgtcaccccctgggctgggggctggaagcctgagtccttggcagcaggggtcagggagagctggggaaggacacttgctggtgccctagtcacacccagggcatattgctggccttgtgcatcctgtgcccccacctcaagtcttttgagtgcaaggacacctgagtcctgaggaaactgggttagcgaagggcactttggaggggctgttccctggcgacacccacaacacactcggttcttgtacccctcttcctgacactgtctctcgccactagttcttggtggaggaaaggcccctgggtcccagagagggggccggctcagggctcaggggtcccggtatgggtgggagtccctcctggccacacccaccgcagctttaggccatgcccccaccgccctgactcacgctgcctcatgctgtccccagttcttcgaagggaaggagctgcggctgaagcaggagtatttcgtggtggctgccaccctccaggacatcatccgtcgcttcaagtcttccaagttcggctgccgtgatcccgtgcgcacgaacttcgatgccttcccagataaggtaccatgcgtgtggagggcgactctgtgaccggacagtgtgtgctaggcctctccctccagcctcggcctgcctgccccatgtaatagataagggagtggagactgggagtgtgggagggtcagttgttcaggattcacaatccacaggctcagaacctgggcttccctcctcctcccgccccactccccccattcctcccacccccatgagcaccggcctgcctctgcccacagcccagtcacagaaccgtgctgggctctctgggggcctccaaatggcatagggcagtgaccatagcatggaatgtggtttggagcccagactgacccctccccctaccccaggtggccatccagctcaatgacacccacccctccctggccatccccgagctgatgaggatcctggtggacctggaacggatggactgggacaaggtgggcttcagggcccctctgccccatctgatgctctctgcctcggggttcccttcccagtttgggagcgtgggaggatatgaatggagtgaagggatcagagcctgaggccagagggaccgtcctggaacctggcactgcagtgggggggcccactgggatgcgtagtgtgtgaggagacccactgggctgaggtcagcatcctgactgcccaccccgtgtgccaggcgtgggatgtgacagtgaggacctgtgcctacaccaaccacacggtgctgcccgaggccctggagcgctggccggtgcacctcttggagacgctgctgccgcggcacctccagatcatctacgagatcaaccagcgcttcctcaacgtgagtccggaggcttgggggatggtgtgggggtgaggggggacacccagtctgggcctgggagtcggggcgtccagccagggccctgagactctggggcagtgggggcactgggcagagctctgggggtgtggggctggggactggggatgggggttcctgggtctggttctagctctgggctctctgggcacagcgggtggcggccgcattcccaggggacgtagaccggctgcggcgcatgtcgctggtggaggagggcgcagtgaagcgcatcaacatggcacacctgtgcatcgcggggtcgcacgccgtcaacggcgtggcgcgcatccactccgagatcctcaagaagaccatgtgagccccgctttccagatcccgcccctctctaggccccacccactcaacgcctctgtcacacagaagccccgcccttcaccgaccactctctggtctctgggccctggcgcctttcacaggtggcgtcattcttacaagcacagcagccccttccagtgccgccctgtcctgagatgacctcctcttacacacagcacccccaaccttccccaggtctgcattccctgccccaggcccctttcagcaagacaccagggtaggggccccagggcagaggccttcattgtacaggggtgagtggtgaccctcgtccaacctcatcctgcagcttcaaagacttctatgagctggagcctcataagttccagaataagaccaacggcatcacccctcggcgctggctggttctgtgtaaccccgggctggcagaggtcattgctgaggtgagaggccaccgtagggccagtagagtcaacatgggtccctgcagggatcagctgggtatggtcgtgtaggtggttcactgcatcagggctcccagctgaaggctgaaatccctcctgcactgtgttccccaagcctcgcatccacctggaggagggacaccatcttatttgcatgagggtgctctgtgtgctaatggaggccctggctgtggaggtgaacacagcagagggagtcatccatgggtcacatctgaagtgagcctggaagggggcagatatctggtagggaaggcgcaaggtcatgctggcgttaggaaaaggccaggaagccaggaaggcctgctggggtcaggtggggtcagccatcagagctcaaggacgggaggggaggaaggtgcatggatgccccgtgccccatctgggcggctggaggaggaggggctgggagggcccccagagcagcctgctgggtgaagggggcttggctgacctggaaatggccccttctgtgttgggaggagggaggacatggggatgggcttggctgagagccgtcttcccatagcgcatcggggaggacttcatctctgacctggaccagctgcgcaaactgctctcctttgtggatgatgaagctttcattcgggatgtggccaaagtgaagcaggtggggagagatgcaatgtgggacagctgtgctgtgtggagagcgctggaggggccagatgtctgggtcaggcgtggcaaatagagctcatctctcctgccagcccaggccgttggtggaagttgcctggagtctgtggtgggaaggcatcatctgacctcacatgaacagtgctgacattgattagcaatgtctgccctggtacaggagtggacagaagtagccagtgagcctcctggtagccatcctcctggggctgactggagtgtggactgtaggatttcctgaggctgtggcctgttggtgagcccttccccgtctctgcctccaggaaaacaagttgaagtttgctgcctacctagagagggaatacaaagtccacatcaaccccaactcactcttcgacatccaggtgaagcggattcacgaatataaacgacagctcctcaactgcctccatgtcatcaccctgtacaaccgtgagtggcagccactctaccctgtctctcagtgctcccccgtgttcctgcggcatagtacatattgcccaaccaacatctcctttggacttgggactactcttgggacatggaattatccccatttcacagatgggcaaactgaggctaagagagcatagcaagtgattgttcgagtcaggcctacggtgtcccagcccagcctctgtcaggagctactacccagagggaaaggtaggcccactggatccctctcgtttctccacaggcatcaagagggagcccaataagttttttgtgcctcggactgtgatgattggagggaaggtgagaagccaggctccagccctgggctcccgtcctttgatatatccaggttgaggtcagcccagctgagttgcaggatagggggtggggggccaggcagtagagctgaccccagactttgtcccctcaggctgcacctgggtaccacatggccaagatgatcatcagactcgtcacagccatcggggatgtggtcaaccatgacccggcagtgggtgaccgcctccgtgtcatcttcctggagaactaccgagtctcactggccgagaaaggtgggtgctgccaacagggaccctagggaggctctgactagttcagtctcaggaagaggtatcagtcgtctcttcctgggatacttgtacttgaaagaagaatctggagagggcaatgcttaaaccatgaggaggccaggcgcagtggcccatgcctgtaatcccagcactttgggaggccaaggtgggtggatcacctgaggtcaggagttcgagaccagcctggccaacatggtgaaaccccgtctctactaaaaatacaaaaattagctgggcgtgatggcaggtgcctataatcccagctacttgggaggctgaagcaggagaatcacttgaacctgggaggcggaggttgcagtgagccgagatcacgccattgcacttcagcctgggcaacaaaagcaaaactccgtctcaaaaaacaagaggaaacaaaacaaagcaaaaaccccatgaggatgccctctaatggtggaatttcaggcagtacagggtgaaattaccttcaaatctgcaacagaggtggggaaatccaggttggacctagatggtcaagaatcaacaagaggtagagggcagtgggggtgcggtgtgagagggaggcttggctggtgaagactgggagtttggggtggggcgactctgagtccagctatgcctggggccagcctaatctgagagtccccagctggtgtgagggtcttccctgagttgacttgtccccctgctgccaccccacagtgatcccagctgcagacctctctgagcagatctccactgcgggcactgaagcctcaggcaccggcaacatgaagttcatgctcaacggggctctgaccattggcaccatggacggggccaatgtggagatggcagaagaggcgggagaggaaaacttcttcatctttggcatgcgggtggaggatgtggataagcttgaccaaagagggtatgggggtcagggttcacgggcaaaagacacccaggtgtggctgctggagagtggtgctgggagcaagcggcacgtctggaaagactggtccaggcccagcaaggtcttggtcatggccagcaggattctgggaaactttagagggcgcttacagcaaataaggttaatgaaattggaaaagaaagaagtaatatagaactgaaggaaaaggaagagaatattatatcaaccctaagagataatattgtttgggaaatggaagtaaaaaaatccttgctctacgccgggtgcggtggctcacacctgtaatcccagcactttgggaggccaaggcgggcggatcacaaggtcaagagatccagaccatcctggctaacacggtgaaaccccatctctactaaaaatacaaaaaattagccgggcgtgttggcaggcgcctgtagtcccagctgatcgggaggctgaggcaggagaatggtgtgaatccaggaggcggagcttgcagtgagccgagatcgcgccactgcgctccagcctgggtaacagagtgagactctgcctcaaaaaaaaaaaaaaaatccttgctccctgaaagccatgggcaaaagggaaatatgggcacagtagttacaaggggcctatggtcagaaacagttcttcagagaagacattatcctggcattacattaaaaaattttattttattttattttaatgtatttttttttttgagacggagtctcgctctgtcacccaggctggagtgcagtggcgcgatcttggctcactgcaagcttcgcctcccgggttcacaccattctcctgcctctacctcccgagtagctgggactacaggcacctgctgccacgcctggctaattttttgcatttttagtagagacggggtttcaccatgttagccaggatggtctcgatctgctgacctcgtgatctgcctgcctcggcctcccaaagtgctgggattacaggcgtgagccactgcgcccggccttttgttttgttttgagatggagtcttgctctgtcacccaggccgcagtgcaatggcacgatcttggctcaccgcaacctccaccgcccgggtacaagcgattctcctgcctcagcctcctgagtagctgggattacagatacccaccaccacgcccagctaatttttgtatttttagtagagacggggtttcatcattttggccaggatggtctctatctcctgacctcaggtgatccaccctcctcggcctcccaagtgctgggcttacaggggtgagccactgcgcctggcctatttatttttatgtttttgagacagagtcactctgtcacctaggctggagtgcaatggcatgattttggctcactgcaacctccgcctcccaggttcaagtgattctctcacctcagcctcccgagtagctgggattacaggcacccaccatcacgcccaggtaatttttgtatttttgtagagatggggtttcatcatgttggccaggctggtcttgaactcctgacctcaagtaatccacccgcctcggcctcccaaagtgctgggtttacaggcgtgagccaccgcgccctgcttgaatcctgatatcttagcattggagagagattttccatgttattagtcttcaaaaatattttaaatgtttgtataacattccatcctatgagcatgtcacaacttatttaatcaattccatgtggctggacactaaggttaatttccggtttgttaaatattactgtgatgagcaaccttttaatgtctacgtccacatctgatgatttccttaagataattatcagaagggtgatatttctgagttaaaaagtatgagttcttaaggctcttgatacagattgccaaactgctttccagaaagtttctcccagtttacactcccacaacagcttcccagagttggcattaaacactgaaagaagtgtctcctgtgaggcttcactagaaagctggctgtcccatgggcaggagggagctgtgagatgttgtgagcatggtcccgcatgctcagaacgaggcctggaagaaccctctggctgcaggatggagacagtgctggagggggcaggtgggggaccactgtgggggctgacaccataatgcagggagagttgcctgagagtcgcacaagggactagagagtcgcacgagggattagagattttgtggggagcgctggtttctggttggaacggttaggttttgagactggcctgtggagcgctttgagccgtggtgggggcgctgagggtcagctgaagggttatctttttttttttttttgagatggagtcttgctctgttgcccaggctggagtgcaatggcatgatctcggttcactgcaacctccgcctcccgggttcaagtgattcttccacctcagcctcccgaggagctgggattacaggcacacgacaccatgcccggctactttttgtatttttgtagagactgggtttcaccatgttggccaggttggtcttgaactcctgacctcctcagatgatccgcccacctcggcctcccaaagtgctgggattacaggcgtgagccaccatgcctggcccagttgaagggttgtacctgttagctgctcttgctgccccagggcaaggccggatatggacttgggctactggaggagaaaagccattttggagcaaacaaactggttaagagacagcagtggcgtgtgggagaaaagagcttgtttgggggccttggctctaacacttagctttctgtatcctccgggcctcagtttcttcattcacaaaggagggatgaaaagctgagcagagaaggggagttgcagggaggccctgcaggggcgatgtggcagccctggggagcagcaggctggacctgggttttgaccctggggcatgggacttctcagcttttctctggaagaggagccaggaacccctttccggggagctgaccacagctctgtcctggcaggtacaatgcccaggagtactacgatcgcattcctgagcttcggcaggtcattgagcagctgagcagtggcttcttctcccccaaacagcccgacctgttcaaggacattgtcaatatgctcatgcaccatgaccggtgagctggttggcccgggaatcactcaggtggggccgcagggcagatcgaggctcaggtgtgtggtggggaagccggacgcgggtcctggtagttggagccaggcgcctttggaagcagcatgaccctctaggtccccggctgtccactgggacagggcaggcttggcccttgacctcatagaacttatcctagccccctaaaggaatagcacatgcctatcctttcccctccaggtttaaagtcttcgcagattatgaagactacattaaatgccaggagaaagtcagcgccttgtacaaggtgaggggtcctgggccaggggttggcagggctttggtggccctggttgggatgaggcagaaggtggagatcctgccagcagagtgaaccagagcttccctttgacctgcagaacccaagagagtggacgcggatggtgatccggaacatagccacctctggcaagttctccagtgaccgcaccattgcccagtatgcccgggagatctggggtgtggagccttcccgccagcgcctgccagccccggatgaggccatctgagcctccagaccagaccccaaaccagcccttgagtctgtcacactctcttgggccagccccagcacctcatgcagagggtggggtactggagttagatctctaagcccctcctggaaccctcattttccccactctcaatgtcccagtgtccagcgtgactaaggacacgggcccccttccgtcctcgggctcccggtcccctcctatttatggggtctgaccaactgcacccactccctaataaattcattctccttgggagcctccttactcctctttgttgggaaatatttttagctcttggcgggctcaacagcagccgcgcagtcacccccttatcctccaccctcggcaggtgcgtcccacggcgggacggtgatgggaggtggagggggcgacccgtgggggcggggcctaggcctctccagcccctttcctggcgtcaccctccacgcctctcttcccagtgccgtgtccatactaggtcagcggccagcctcgctggccgggggcggggcgtctgcctgggtggggcccaccggggctgggagccgggacttgggctgaggcttcccggaccacggaggatccgcgctgtcgagggcaggacccaggagggggaggaagcagaggatgctcggcgccttcttggctccgcccttagccccgccctactgcggcgtttaagggtctcttagcaggtggctacactggatccaaagtcgggggagtgttacggcagggaacactcgcagaccgcctagtctaggccctcattatggggaaactgaggaacagaaaggtcctgtttctaagtcttacattaccaagactgaggtgcgggggcggtcctggatcccccgccccaaggctgggaggggcacgcctcggaagggaggtttggggtcggtggtttcacagtgagtgtgtctgaagccaaatggtcggaaaccgttacccgctctcctaggcccggctagtggggaccccaaccgcctgcggctgcccctcccaagttcctccctgttggccaggcatccaggtctccagtctccgagctgcggagaacccaccgccacatgcggctgcccctttccattcgaccctgtggggagccaggcttccggggccccgttcctcctgtgtgaactgggccccccgcccccattcccagacatcaaggccgcgtctccagatagccacgatttcattcctcgctccccacaggtccctctccccaaaatattcccatcttgtcctagcccatcccccagactatctcaaggaccagctgtccccacgcccccgacctccactaggcctgtgccacccgctgcctgcaggaagacgcccggtcccgggccgggttagccccatgggaacggtttgtctcgaaaacaggaacccgagctgggggctgggcggggcgccccttccccaccgcagtccgcttcctgcccctcccggcttcctccgcccgacacccaggcagggcggggggcactggggcgtccgcggttgggggaggggctcttcgtttcggtcccccctccgcgtcccgggcggcggggcctccggtcgcccgccctcggggcagctagtggcgcagccccccgcccgcggccctggcctcccgggcggcgcggcaggggaggggttaagctgccgcagggaccgccgcgtgcggggcgagagggagcccccggtgggggtggcgcagccggcggtgcggagctccgcgcaggggcggaggggggagggggcagcctggcgcgggggcgggggcggggcggcggggagcggggccgcggcgtggagagcgggcgggagccgcagccgcagcgaggccggcgggcgggagcgcacggaggtggggtcggccaggccggtgcgggctccttgcggcaggtcccaagagtgagtgggcgagcgcgggcggggcgccaggcgaaggagggcgcggcccccagcgactccccccccgcccagggcggcgcgggcgggctgggggcggcgagcgggtggggagtctgcggcccgggtctgggagagggggcagcggccacgagagctaaggcgcgctggatccccggagggcggaggacctccacggtgcacccagcttttcccagccaccttccagcggggccctcccccgcgtacccccatttggcagatgagaaaattgaggctcccagaggccaagtgattctcaaggtcacacgaggaagcggtagagccaggcggggacggctctgggtggctcttaggaaaagtccgcctgagaactccgtacaggagctcccctgtcctccagcctgggggagtgagtatgtgtagggccggggtacctttccgtggggcaaggctctgccaaaatctgggagtgaggggagtcagggagctggggccgcagggcgggccctgcaccgcaaatgggaggggggcgacggaatgggcgtgcgcacccatgggggtgtgtgcatgtgtgtgggagtgtacatgcgtggagaggcactgccttgcgtgtgtgcacacgtgtgaggatgtcagcgcctgtgtggccgcgggactcaaggctggcctggctcaagtgaacagcacgtccaggaggcgacctcgtccgcgggtttgcattctggggtggacgagctgggtatgtgtgcctgagggtttcttcgtgcaggtgtgcacagggtgtgggtgccattgtgtgtgagagacggaggatgggaggccggtgcctgtggcccggtgcgtgtaagtgcggacgcctgcacctccacttaggtccccggcctccgacgactaacttgggtgtggagtgtttgcccctgccagggtgcgtatgaccccgccagtgaccggagttgctaatggtgtcatgcacccaccggccacccttggcgcgagcgcccccctctggacaccctgctccgtgcgcgctcacagttcgcctgtgcggggccggggccagggtcaggagccggggatagggaggaagagggcctgtggacaagctgagccgggacccctgggacctttgcggaggtggcctgggagcgctcagttcccaggctgaggcttcccgctgacgcctcctggccgcagcgggctccccccgccccaggaatgttcctctcccatccagtccgcctcccctagggcaggccccctgggggctgccgcagccccgcctcgccttcctgggctcccgggagggggcgaggcgagcaggacgcctgggttctctccccccacctcccataccagggagaaattcctccgaggtcccctcaggctctgggttcccaaaataaccctgcgggggaagggaggctgtggagggagggaagcgggaggggcgcagagccgagctgcggggtgctgcaggtgcctctggggagagggcgcgaggagaaggcgccctgcggggggctgggcgccagccagtcctgggatcttggttcgtccccatcctcgtgaagcccctcggccttcccgcgactccgagggtgggccggaagcctctctgcgggtccgtttcccaactggcgggttgcaccatcccgggccagaccgtttaaccccgggagtggccgcgggggacaactccgcccctgtccagcagggggcgtgcccgccccgccccgtttctgcccgcggggccgctcccccgcccgcgactccgcagactcccgctctgcctctcccgggacaggggttcggtccgagcccggtgggaggctcccggagcgcagcctgggcccagcccaccccgcgccggcggccatggcaggcaccctggacctggacaagggctgcacggtggaggagctgctccgcgggtgcatcgaagccttcggtgagtggctcgggagggcacacggagcctgagcctagccccgagtctgagcccgggtccctgcctcccaggcacagtccagggcacagccctgacccggacccaccctgctccgcagcgtgcagtctctttaacgaaagcctcctccgcaacgcagggcagagagatgcacgcccttcagacagatgaggtttcccttctctagccttccccagcggcggcgaagggagggccgggtcccggactctgacacttgaggggcattatctgtctcccggggaatccggaggaactcgctatctccggcctgggagctgtttccggctaatggggggcggcttatctggtgaaggggtgccccttccccccaagcgctcaggaaatgacctctggattcttgaccccggggaacccaggctccttccgccccagctggttcccctccggacgatgggcggctcgggcgctcccctcctccagtcctcagggcgtgcctatctctcgcccaccacacctttcctctctaatttgcctcctgctctcggagtcctgggcaagcaggaggtgggcggggtcgagcgtgcacccgaaggaccgatacctggcgggttgcggggtgaggatgaggcatggtagctgcggacccagctcagccacctgtctttgacccttcggagtcagatgactccgggaaggtgcgggacccgcagctggtgcgcatgttcctcatgatgcacccctggtacatcccctcctctcagctggcggccaagctgctccacatatatccttcgccggccttgccaaggcccccgccgtcggagcccatgcgcagcccctctgcccagcccaggtgcagaatgagcctcgctcctaagtataggccactccttatcccagagctcaggcgtcgtcccagcctccaactagggcctaggctctgccccctccttgctcctagcgactcggtcctgtccccaggctctgtccccagccgaggccttgccctccttctccctagagtctagggcctgcccctgcttcaggcttgggtgcgccccgtgcatctctctctcccagagcccaggctttgctttcagcctccctcagcacctagtcctccacccccacctccaacccctcccagagctcaagcctcacccccagcatctccgcagagcgcaagccccatccctagaacgtgtctcctagaaccaggccccgcccccagcctccctccacgcaggcctccctttctagagttaagcggcctccttaaccctctccttcacctaccaacaatcccggaaggacaactccaattccctgcaggtgaaaacgtgccacctggtcaggtgagtctttcccctggggctctagcccctcccctttctcccttctctctggcttcaggctggcctggaggagggggcagggcgctgtttctgggagtgggtttgaaccctggcttgtccgggtgggcagtgctgccacaggctcaccccttcctgggtctgggccttaattttcttttctgcgcagtgcgggtggttgtctcaagggtctaatgtacacttggagtggcgaaggaaagagctggaaccatagtttgagggtctttttgcttaggtgactataatctcaaatagctccttgcagcctgctgggtgatggtgggggaagggctatcttgggtgactccccgctcctccaggtactggatctccgccttcccagcggagtttgacttgaacccggagttggctgagcagatcaaggagctgaaggctctgctagaccaagaagggaaccgacggcacagcagcctaatcgacatagacagcgtgtgcgtggggggagcacagagggctgggggggcactcagtatcctataccatctgtgcttaataaatgtctgttgaactgaatgagtgagggtcatgttgctctctcgcttaaaaaccttccatggctccctattgccttcaacatgcctcctctgggcagcttggcgttcctgcctcatcttccactgccaccacccatcccacacacctcctcctgtagctgcgctgggtcggctccccgtcggctgagctctcgagtcctttctcatcatggtgctctgctcatatcatcccccttgctgcctcctccgtgttaccaagactcagttcaggcatgaagtctccgtgggctctgagggttcggggctcttccggggtagaatttgtcgttcccacctctgttttccatggcactttgtacagactcctgtacaaagacctctgtacatgtgtcacgctgttttgtgatcatgtgtttctgtgtctgtctccctcagtagactgtgagctcctcgagggcaggaaccgtgtcttactcatctctgtattcccagcgcctagcacagtgcctggcacagagtacgttgttcataaatgtgtgttgagtgcatgacggggtggggggagatgaggaggagttgctgggactgggaacattcgtgcctaggacagtgcctcgcattatgtaggttctcagtaagcgtgaatggtgtgtctgtgtgagtggggggccacgaggcatgcgcatgtccagcaaagggctcactacccctgcccccccagccctacctacaagtggaagcggcaggtgactcagcggaaccctgtgggacagaaaaagcgcaagatgtccctgttgtttgaccacctggagcccatggagctggcggagcatctcacctacttggagtatcgctccttctgcaagatcctggtgcggcccgagggctggggggtcaggggtccaatgtgggctggaagagagttctaggaggggcagggtccctggcgtaggctgggtcacagggtgcatcaggggtttcagtgtaaccactgaaggtcagctggagggtgaggagtggctatcagtgaggggagaggccggcaaggtgctgaggccactcctcatgcccccagtttcaggactatcacagtttcgtgactcatggctgcactgtggacaaccccgtcctggagcggttcatctccctcttcaacagcgtctcacagtgggtgcagctcatgatcctcagcaaacccacagccccgcagcgggccctggtcatcacacactttgtccacgtggcggaggtgcctgcccctccctcccggtgtctcccaaccaccccacatgccagtcaggccaacccttcccttcccctaacccactgccttctctctagataagctgggccaaattctgggcccactcagtgactccctgcctctccgtccccatttgccttccagaagctgctacagctgcagaacttcaacacgctgatggcagtggtcgggggcctgagccacagctccatctcccgcctcaaggagacccacagccacgttagccctgagaccatcaaggtgcctgggactggggaggggccggtgcttcccaggtctgtcttcactgggtcctcccagcagcactgggggctgggcacagctgtcctcatttgatagatatggaaatggaggctcagaggggttaagtgcttttctcagtttgcacaatggcaacagcagagtgggggctcacaggtcgtcagggaccccaaagctagtacttttttttttttttttaagacagggtctctctctctgttgtccagactggagttcagtggtgcagtcacaagctcactgcagccttgaattcctgagctcaatcgatcctcccacctcagcctcctgagtagctgggactacaggtgtacgccaccatgcctaatttttgtattgttattaattttttttttttttttttagagatggggttttgccatgttgcccagactggtcttgaactcctgggctcaagtgatccgcctgccttggcctcccaaagtgctgagattatggcttgagccattgtgccttgccacttgtagtttcttcttttctttctccttcattttttattatttttgaagtattttgaagtattgagtaacatacatatagaaaagtatataaaaacatatgagactgggcgtagtagctcacacctgtaatcccagcactttgggaggctgaggtgggcagatcacgtgacatcaggagtttgagaccagcctggccaacaaggtggaaacccatctctactaaaatacaaaaattagccaggcatggtggcacgcacctggaatccaagctacttgggaggctgaggcaggaggagaattacttgaactcaggaggcggaggttgcagtgagccaagattgtgccacttcactccagcctgggcgacagagtgagactccatctaaaaaaaaagaaaagtatataaaaacatatgaatagtttaaagaaaaattgtaaagaaaacactgtgtaactactgcccgggttgggaaatagaaccttgccaggcccccaagcgcccagcactttagagcataactccctccccacgacttttgcaatgatgatcttgcttttctttatagcttcaccatgtaggtatgcggtccaaaacaatgtggggctttttgttgtctgttttgaactttctatgaatggaatgttgtttgtgttattttatgtcttgcttttttcattccacatggttctgagagtcttttcattctgtcatgtggagcaattgttttttcattttcattgccatataatattttattgtacgtctaccccaattcatttatttatttatttttttgagatggagtctgtctctgtcatccaggctggagtgcggtggcgagatctcatcactgcaacttccgtctcctgggtttacgtgattctcgtgcctcagcctcctgagtagctgggattatgggctcgtaccaccacgtctggctaattttttgtagagacaggctttcaccatgttgccgaggctggtcttgaactcctgagctcaggcaatccacccgctttagcctcccaaagtgctgggattacaggtgtgagccactgcccccagcctaccccaatttatgtattgattctattgttgaatgttggggtttttccttttcttttctttctttctttttctttcttttttttttttttttgagatggagtcttgctctgtcgccaggctggagtgcagtgacgctaatttggctcactgcatcactgcaccctctgcctcccgggttcaagcgattctcctgcctcagcctcctgagtagctgggactacaggcatgcaccaccacacccggctaatttttgtatttttttagtagagatgaggtttccaccatgttggccaagatggtctccatctcttgacctcatgatccatctgccatggcctcccaaagtgctgagattacaagtgtgagccaccacgcccagctggtttttccagtttttgctgtttggacggggtggctgagtatgttcttccaggtcattgtcctgtgctgccttgcctccctgagcctctgtttctcctgttaaatgttgatgattccctgcatccaggcctggtttagaggtgtggtgcttttggcagtgagtattgccttgaattcatggcaatgaattcaatccccaggggctgagagagccagtcgtgggggacagtaagggaggtttttactctttcacctgtccctgaccctgactcctcctcaccccctcctacatttccagggctgaggtagggaggatagttgtgggggtatgactcctctgtcctttgtccccagctctgggagggtctcacggaactagtgacggcgacaggcaactatggcaactaccggcgtcggctggcagcctgtgtgggcttccgcttcccgatcctgggtgtgcacctcaaggacctggtggccctgcagctggcactgcctgactggctggacccagcccggacccggctcaacggggccaagatgaagcagctctttagcatcctggaggagctggccatggtgaccagcctgcggccaccagtacaggccaaccccgacctgctgagcctgctcacggtgaggagcagggggcagggaggtggggagctgggcaccaggggttgacagtttccccaggtcctggctgtgggcgtggcctggggctctgggttctggccaagaaactgagatctagcgtgggctctggggtttggagtggatgctgagaaggggtccaggctctggttggggctgtggactgaggtctgatctccaggctggtatgtggactgtgggcagtttgaactgggcctgggtcccgggttgagttctggcaatgggctgtgttctagggctgggccaagctctgcattctgtgggcaggggtggtttctaagcatggccctgggctcggagtgaagttctgggctt

SEQ ID NO: 323 - DNA, 3606 bp, Homo sapiens
acttactgtcattaaaccagtatgatgatggagtggggaatgcctcagtttctcccaccgccgagggcctataggactacagttcccagggccccgtgctgcaggctagcggcctcccgccaatgctggccagtaacctgagcatccctctccaaaaggtcacttcagggctccttgagggacagcaacagggggagcctagagctgctcagcttcggtgggggtggagtgagggctgtggccctgcctcacacaacctccctcacaccacccctgcaatgcagggtcgtgggcccctttctcaaagacatccagtggcctctgctagttgcacctcttccgtcaggggacactgacttggctcctgcaccacagcctgcagggggtcctggttccttttgccacaacacatggcctcccatcctggttcagccactgacagacagctccccaatccagcactctgcctgctccttcttgtatccaaccctccaaaaggcagggacaagggacagaagaccatgtgcaaggcctggaggaagtgggtcagcacaggcctgtgaacaagccaggccagtcttggcggcccaagtggagctcacctctccctcccctctcctctcctccccttgccctcaaaatagctccctgagctgccaggccaagaccctcccattgcaggggaggcggggcgtgctgcccagagccaggctttaaatccccttgaggctggggagctccactccttggctggaggcagtgctgaggccgccgtcccctctaccatcagtccagtccggcccgccctcctgcagccatgtcccggcccctgtcagaccaagagaaaagaaagcaaatcagtgtgcgtggcctggccggcgtggagaacgtgactgagctgaaaaagaacttcaaccggcacctgcatttcacactcgtaaaggaccgcaatgtggccaccccacgagactactactttgctctggcccataccgtgcgcgaccacctcgtggggcgctggatccgcacgcagcagcactactatgagaaggaccccaagaggatctactacctgtctttagagttctatatgggacggacgctacagaacaccatggtgaacctggccttagagaatgcctgtgacgaggccacctaccagctgggcctggacatggaggagctggaggaaattgaggaggatgcggggctgggcaacgggggcctgggccggctggcagcctgctttcttgactccatggcaacactgggcctggccgcctatggctacgggattcgctatgagtttgggatttttaaccagaagatctccgggggctggcagatggaggaggccgatgactggcttcgctacggcaacccctgggagaaggcccggcccgagttcacgctacctgtgcacttctacggccatgtggagcacaccagccagggtgccaagtgggtggacacacaggtggtactggccatgccctacgatacgcccgtgcctggctatcgcaacaatgttgtcaacaccatgcgcctctggtctgccaaggctcccaatgacttcaacctcaaggacttcaatgtcggtggctacatccaggctgtgttggaccgaaacctggcggagaacatctctcgtgtcctgtaccccaatgataatttcttcgaagggaaggagctgcggctgaagcaggagtatttcgtggtggctgccaccctccaggacatcatccgtcgcttcaagtcttccaagttcggctgccgtgatcccgtgcgcacgaacttcgatgccttcccagataaggtggccatccagctcaatgacacccacccctccctggccatccccgagctgatgaggatcctggtggacctggaacggatggactgggacaaggcgtgggatgtgacagtgaggacctgtgcctacaccaaccacacggtgctgcccgaggccctggagcgctggccggtgcacctcttggagacgctgctgccgcggcacctccagatcatctacgagatcaaccagcgcttcctcaaccgggtggcggccgcattcccaggggacgtagaccggctgcggcgcatgtcgctggtggaggagggcgcagtgaagcgcatcaacatggcacacctgtgcatcgcggggtcgcacgccgtcaacggcgtggcgcgcatccactccgagatcctcaagaagaccatcttcaaagacttctatgagctggagcctcataagttccagaataagaccaacggcatcacccctcggcgctggctggttctgtgtaaccccgggctggcagaggtcattgctgagcgcatcggggaggacttcatctctgacctggaccagctgcgcaaactgctctcctttgtggatgatgaagctttcattcgggatgtggccaaagtgaagcaggaaaacaagttgaagtttgctgcctacctagagagggaatacaaagtccacatcaaccccaactcactcttcgacatccaggtgaagcggattcacgaatataaacgacagctcctcaactgcctccatgtcatcaccctgtacaaccgcatcaagagggagcccaataagttttttgtgcctcggactgtgatgattggagggaaggctgcacctgggtaccacatggccaagatgatcatcagactcgtcacagccatcggggatgtggtcaaccatgacccggcagtgggtgaccgcctccgtgtcatcttcctggagaactaccgagtctcactggccgagaaagtgatcccagctgcagacctctctgagcagatctccactgcgggcactgaagcctcaggcaccggcaacatgaagttcatgctcaacggggctctgaccattggcaccatggacggggccaatgtggagatggcagaagaggcgggagaggaaaacttcttcatctttggcatgcgggtggaggatgtggataagcttgaccaaagagggtacaatgcccaggagtactacgatcgcattcctgagcttcggcaggtcattgagcagctgagcagtggcttcttctcccccaaacagcccgacctgttcaaggacattgtcaatatgctcatgcaccatgaccggtttaaagtcttcgcagattatgaagactacattaaatgccaggagaaagtcagcgccttgtacaagaacccaagagagtggacgcggatggtgatccggaacatagccacctctggcaagttctccagtgaccgcaccattgcccagtatgcccgggagatctggggtgtggagccttcccgccagcgcctgccagccccggatgaggccatctgagcctccagaccagaccccaaaccagcccttgagtctgtcacactctcttgggccagccccagcacctcatgcagagggtggggtactggagttagatctctaagcccctcctggaaccctcattttccccactctcaatgtcccagtgtccagcgtgactaaggacacgggcccccttccgtcctcgggctcccggtcccctcctatttatggggtctgaccaactgcacccactccctaataaattcattctccttggg

SEQ ID NO: 324 - protein, 840 aa, Homo sapiens
MSRPLSDQEKRKQISVRGLAGVENVTELKKNFNRHLHFTLVKDRNVATPRDYYFAHTVRDHLVGRWIRTQQHYYEKDPKRIYYLSLEFYMGRTLQNTMVNLALENACDEATYQLGLDMEELEEIEEDAGLGNGGLGRLAACFLDSMATLGLAAYGYGIRYEFGIFNQKISGGWQMEEADDWLRYGNPWEKARPEFTLPVHFYGHVEHTSQGAKWVDTQVVLAMPYDTPVPGYRNNVVNTMRLWSAKAPNDFNLKDFNVGGYIQAVLDRNLAENISRVLYPNDNFFEGKELRLKQEYFVVAATLQDIIRRFKSSKFGCRDPVRTNFDAFPDKVAIQLNDTHPSLAIPELMRILVDLERMDWDKAWDVTVRTCAYTNHTVLPEALERWPVHLLETLLPRHLQIIYEINQRFLNRVAAAFPGDVDRLRRMSLVEEGAVKRINMAHLCIAGSHAVNGVARIHSEILKKTIFKDFYELEPHKFQNKTNGITPRRWLVLCNPGLAEVIAERIGEDFISDLDQLRKLLSFVDDEAFIRDVAKVKQENKLKFAAYLEREYKVHINPNSLFDIQVKRIHEYKRQLLNCLHVITLYNRIKREPNKFFVPRTVMIGGKAAPGYHMAKMIIRLVTAIGDVVNHDPAVGDRLRVIFLENYRVSLAEKVIPAADLSEQISTAGTEASGTGNMKFMLNGALTIGTMDGANVEMAEEAGEENFFIFGMRVEDVDKLDQRGYNAQEYYDRIPELRQVIEQLSSGFFSPKQPDLFKDIVNMLMHHDRFKVFADYEDYIKCQEKVSALYKNPREWTRMVIRNIATSGKFSSDRTIAQYAREIWGVEPSRQRLPAPDEAI

SEQ ID NO: 325 - DNA, 49686 bp, Mus musculus
  misc_feature (1)...(49686): n = A,T,C or G
ctctccacagccgaggctccaacacctgaggggacagaagcgaagcgaacgcggggagctccaacaggcggcggcacgggaccgcgggtccaggggtggcctccgcatggccccaccgtgagaggggacccagcggctgggacacgagcggtgagtagggccgccggccaactgtgtcccccaaggcctgcatgctcacggaccccgcccctcttctcaggaggccagctagacactgggagggtgttcagggttgggagaggaacacaggctgggtggcgggagccgccctccgccctttttgcccgctagggtctgctaacaaagctacatttcgagatcaattccgtggtggttggagcatccaaaggatgcggttgtcatggagatggggcagagagaggaagcccaagatggtcaggactgggccagggagtgggggcgccgccaagagccccagaccggcctgaagggaggacggggctgccagcccaattgtctcctgggctctgcctcccggtcccctcccccttttgtataatcagtgtcagtgtgtatggggtactagtgtcagtttggtggtctgtggttggggtgttgtgtgctggggcctgccagagctacctccacaacggaatatctttgaggatttatttctctttccagtttcccaactttgacaggcaggcctggggcccaggcctctctcttgtctctgcaagagcaggggttcgaatgggggcgtggcaggcagtaggcaaggccaggcctcacagaaacagccttgattggagggggtccttggaacccggtgctgggctgggtggggcagggaatccagatgtggggaccaccctatccagctggctctctcttagactcttgtccctggaggacctgggactctctgaaataagatccagggcattgtttctacacaagaccttgggcccactgcccgatgcccacccctttgtcttaggttcatcttgctgggcccagacagagatctgggggcagatacaattcttatggtgcaagagggcacaagagtcctggcagctcaggacaagtctggctgaggtgactgagacaggcaggctgctctgggttggctggtgtaggagagtgggcctggggtaatattcgcattttcctaggtctcctccagagccggaagatagctgctttatgaataacactcatcttgaagggtagtaggcaaggaacatggggtaacctccaagccctcccccactcccagccagatgcctccctcccaaggaagctagaagttctgtggcccggatctgtgaatccagacaatgggccagccattcttcttgtctgttcaggagtctggagggaagaattgttccctccaagcctttctcctgctgcatggtgccaggcagtgggttttgagtggggctcctacagtgtttggtcctggtggaaacaggaggcctacaggcatggccagagccctcaggaggttcccacgcactggggtgagaaggctgagggatgacagagttcctggaaggcctcttccactggtgtctcctgcaggactgagatctcagtgcccaggcaattttacccctggacctctgaagtgccctgtgccagcctaagaggtctccttcctgtgtgcgggcttgccctgtctgctcattacctgggtgaggacgcatatcctaagcagatctagggtcatttctcaagggagagagaacagccagctggaatgattttctactctccccaggactgagagacggggcctggggatgccacaatggcttgcttccattgatggagcacagccgctgtgtggggtaccccaacacctctgagctttgggagggagacaccactattgcccctattccaatggagaggcctctggcccagggaacaattgtctgctccaagtaagtccctcgtggaggtaggtaggacatacattcaggtgaaacattatatggctcagacctgtgtccccagctgtatgcacccagccacctcctgttctcttctgcaactccagcttaggacagaggtgggcctgaacacctgcctatctgcacaggagtgaccttggaggatactcaagtgttacactggggtctcctggggaggtaaggtaaaggcactttccttccggacagcctgcagagattgaagccgcctctcttagcagacgacactctagacctcctctgccagatggtcttttccaggaaaatctgttttgagaagcatcttgtgtctggggttccatatttagcctggctccttatacgggaggatatactcagactgtcacccttcaagggatgtttgggggtggagagggtctagggctacacctggctccttgcacagcttagccaagatggggaggttctgccctggctgcaatatggcctgctggtctctttggggtctggctatgtcctgagagccctgttcttcattgagcttggctcacagtggagtcacgtccactgtgggtggcgagtcctcgggagctgtgcctgcatgtttgagtgactggaatccaggccatggcaaggccatggtctcgctcattttaagagtgcgggctgctacaagcgtcctcttccttgcctgctcaggaaccagatcgcagagatgctctttggggcttttcctgcatcactttccttctgcctcattccatctggtccacccacaccctcttcacccagagacccagatttgccagggctaacatctagccacgcttgctcctccccttcgctccctcttttgaaagctgcaggctttgtaacacatcacctcaaactatatcagcacatattccccaagtcaaggatatttttttcccttgcaactattgtcacacctgaggaatttagcgatgattcagtttggtcttatatttagcctgcatccacgtttttctagtggttctagtaacaacttttgcaagcatttgttatggatatttggtttggtttggttttgagatgggttctttttctatagccctggctgttctggatcttgctatgtagaacagggtggctttgaactcacagagattggtctgcatctgccacacctgactacaaatttttttttttaatcaaggaacatacactatatttagttattatgtagtacattagttatattttagttctggattaatctcattttctttcccttccattttaagacagggtcttatgcagccccggttgacctcaaacttgtgtagcaccaaggatgaccttggactcctgatcttctcctccctctctctctctctccctctccctctccctctccctctccctctccctctctctctctctctctctctctctctctctctctctctctctcttctagacagggtttctctgtggaacaactgtggctgtggctgtccaggaactcagttagtagaccaggccacagaccagatcgcttgaacgtacagagatctaccagcctctgcctcctgagtgcctgctctttgattccacattctaagtattgggattgcaagcatgctccaccatgctcagctaaataacctgacttttaaaaagtttttttcttcttatactgttttatggctttatcaattttgcagttgtgcagaatctcttatgttctggatttgtcttctcgctcgctcctgatcagattcatgctaacattttttgacagatcccataggtggtgtcctgtgcagtgtcacatgggagggcacaccgtaaatagatagtgttattgtgaggccacttggctgagggtccatttgcttcaattctttaattgctcttgctacatccagaacttcatcaaactgagcatccctgcagcatcaaagactatcaaaaaagatcaaacctgtatcagactagaagctggagagaggacaaccagcagagagacgattgctctcagcgtttactgcctctgggtggaggcagacgctgctgttgtggggagaagggaggcctgagaaaggaatgaggggtatgaggagtgtggcaagaaaatggagcaagaagggtatggggattccctgagagatcttacagaggtgagtcgtgtggctgttcactagaagattgtctgaggaggaacaggatctgctgggtagtgtgttggatggatggatgctcgtttaggaggctgtgatgtgctttagcacaagacacctggacactgtagcgtgcctggcgccgtgcttctcctgggttgtgtgttggcctgaagctgcaggggtctgcaggagagggatgtactaagagcccagacagatggacagcctcagtgttcagctagaagcagaggatgaacagggagctgttgcctgtggcttgggaagggcacccagcagagactgactgaggtctgagggacctttggattgccaagtgtggatgagaggactctgcttctcacgtgctacccctttctgaagcttcttttgtggtgagggcaacctggagcaggattgggtggtgagcttccaggcaccagttggagtactgaacaggtgaggggccagcttgtaggcagttgcccctgcaagagtcaggaggcccctcttgttcccagaatctaattctccccctattccactttgtcagactccattaaagtgcttcctggtgaaaccaagtgcttggtttcctctagtccaagggaaaccacagtctgatggtacagctcacggtaactccgacccacacattcagatgggccttcgtctgaatgggcctgtcccacactcatgccgtggcccagaaccactgtctcctcttctgcttgacacttcttctttggcctttgcccagagtcttagtttgggtttctattgctgtgatgaaacctggaggctgatgcagataccatggaggagtgctgcttactggcttgctccttatggcttgctcagcctgctttcttaatagaacccaggaccataagcccagggatggcaccacccacaatgtgctgggctctcccccattaatcattaattaagaaaatgccttacagctggattttaaggggacattttctcaattgaggctccttcctctctcatcagactctagcttatgtcaagttgacacacacacacacacacacacacacacaccctattaaatccatttgggccctgcttgcccacatccttttcagctgaaatcccttgggaaaacggaagtctcagcttcctcaggtgcatggaccaagcttacccatcctcctgtcctgcatctctgccctgccctcctcctgccagggtgggccagggccaggtgttcctgtgctgcctaaggacccttggcctgtgtgtcagatcttatgacttgtctcctgcttgaagatactgttcagcaagtccccccgagccccctgcaccgtaggtagttcctctgtttgtcaggtcacttcatcagggactgccttgctgttgcctctcctggaaaggctgttcttgtgctgtctccagccagagcctccaggtcacttctctttctagcaaaggctatccaggctccgcaccctctcctcacaccgtctctgattttagtcggtcgtgacctcccctctgtgctccccgattgccttctcaaggtcaccagtgacctccatattggcactgcagagacagcttctcattcttgcctgcaacactccacattctatctccttccttgggattcttgcttgccttctaggtcacgtattctcctgttcgcttcctattttgtatgtcgctcctcgactttggatgctggctcccttcttctcccttcaaacgtgagccctcctggactcagccccttcacagctgcctggccaggactttacactgatatcccctagtactgcagctgtagtgccgcctgtgccttgctggccccacgtccatgctgttctcacggacccagcctcaccttcccctgcaaacttcaggtgcttgctccacacttcagtttccatgtcttccggatgccccttctccaacaggaagcacccatcttcctcccagacctgacccaccaatccctctccttcagggatggcgtttccatccttctggctgctcagggtcttgactcccttgcttttctcccattgaggcacaaggatttaccaagtcaaggtgtcctctctgtgggtcagggaagcgagaagagatataagtcctcccttagccacagataacttctttctgcggcattgtgctgttttcaatctagaggtcacaaacctttgtctgatccaagctaaacagagccagggcaggccagggaattggaaggagggtggaggactggcagggaaggcttaagaggcattaggtagtgagggtctggggaaggtgggaaagccacagggaaggagattggaaggagagaggttcccttggtgccactgaggaacatgagtgagtctgcagtgagtagaaaggttcgccttcttggctattgaaggagaccaagggagatgcccagacactgtgttccccaaatggccaggcttcctccaggtaccctgcagcacagagctggacctgcacccactcagtcccctgtaacttccagggtctgacacagcacacaggctatgggtcagatgtggcatctagaagcagggtgagtcctaggtaaccttctgaagttggaggcaggtggagcagtggtcaggggctcaaggactgccagaacctggacagcccagttctttgtgattctagatagttacggtcttaccctatagggaggtcagctggaggtcaagttccttgttccacgtgatttgggatttgaaggcagacactggatttcattactgttgaggcttctccaaagaagcatgctgatatatgcaaatggtatgcaaatgagggtgctagttgtcttggggcagaaagctaagagattttaaggaataacctttgtggagtggccctgaaagtcccagtggacacatgcagatggatgcaaatgggcactcatccctcgggttatgaaaaggcctcctggacgtccacagcccacaggaggctggcctcctagcaggcagaacagccaggcttgttaacagcatcaagccatcactacctgaaagggacaggcacacaggattcagatttttggctcttacttaacaccgtgtgtgtctcatgtgtcttgagacggaggtagttaggagcccggctcaggtgggagtgtttgtgtgacttaaatgtgggcttaagggtaggggtttcatctctgttcgacccactggtcccacaggagctggtctctgtctcctcccttacactgggcctctgaagcccctgtcttggaacctgctctgacagttgccaaggacaacggtctccaaggctaaatggactgtatgctctgtgttgctcttctgagcacctctctcagggcacgagccatcagccagttctcctgtagacctgggaaggttctggaaggaagtaaacaagatgtttttctgaatacagtgcacactccattttctttagttaccctgtgaagtaggtgctgtgaaagtctcattttgtggatggtcctgaggcttaggacagtgaacgaccttcctgaggtcacacagctggtggggagtggggatgcttccagggctcttgggtagttgtgctccccatattgccctgggttcctcctgctctgcgggtggggtggggtattaatatacttaaccaatctggagcctgtctttcgggccttgtggggaatgagatgtgtggtcttgggacaccaccagcaagaagtcccctcacaggtgccaactgcccatgctgtcaggcgcgtcgtagagtcctgtggagctctgaaagtgctcagatctgggccagtgaagggggagggtatagttggccagggcccgttcccagcatttgctacatgccagccagcctttcacactgattgtcatgtttgccacgtgtgtgtgtgccgtgtgtgcgtgaacccagccatgtgccaacaatgacatgatctagagagctcattagtgcaggaggatctgtggggagaagggcagtggggtcactgggaggcaggtgggtcccaggggcagataacaggtatataagcaagaacattccctctttcattgttagggaatctagtggagctctgtgggcaggtgtctgaattggaaagttcttggagactggataggttgcggcccaagctggcttagacccagcatttccagggccccacgggaatcgatgctgccccttacagcacgggtagtaggtggcttctaggggaacctgtgggtggtccgtgtgtgggctttagtggcctgtgagcctcccaaacaacatctgaacgttttgcatatatgagaatccatctggggtgggctcgcaacctccatcaggtgttgagcaagaccttcagctgggcatgatttgaatgcgatgcaggtggggaggtgaggccccccagaacactggaggcaaacacggagtgtggcagttcccagctctgacccctgggacaactatggtctcaacgcctctacaccaaccttctcagagctttctgcattcctgctctgggttcaataccccagaggcttagattctgcctgccctgagcagttcttggcacccatcctggttccgcccaatgcaaatacaccctccatcaagccctctgatgccactgtgtaactatggttggtgaagatgcctgtcttcgccattatcaacccagtctgaagttctgggttgtcgctcttcccgtcctcagattctccataggtggaaggatttctactgtgggtgtctagcaatgtaggcccgtctgcccttaacgttgtcctcaggtttgaaggcttctcactcccccttgacaccagaggaactgtctccttccctctgtgtgattgtgtggtcctgagtgtgtgtgcacatgtgtatgagcccacacatgtctgctatgcacattaaacacacaggctctcacagtaagccagcctggagcttctgcaggaaccactctggtcctggcctggtgttcccacagcccctgtctgctacccagcatggaaagggtcatcaatttgtccatccctgcagtagccttgctccgagcatgttcctcaatattgcctagcctctgccaaaaatagggacggcaacaatccaaactactcagccaacagatatttataaagcattcctatatgctgggcatagcacaggctctggacaattgtgtccatgataggtccctgcactcactggaatcacatcctactgtcagggagcgtggtcaggaaataaacaggggggttgggaaatttcataatggctgtcagtgaaatgcttgatggtcaaggctgaggactccacttggacccccagaactgacataaaaagctgggagcaatgatatgtccctgcagctcctgagctgggaaggttccgtgagagaccccatctcgaaaaatgcgatggagagggattgagaagacaccccatgttgacctcagacctccatgcatgcatgtatgcatgcatgcacataaaccacacatatgtgcacacgtacaaggaaagctcacacacataccccaacattaattaattaaaacagaagtgtttccattttccttggtgctttaaaagctcaggggtgtgtggccagagtcagggcccctctctattgaggatagggaggctgcttcggggttcagccttgaatggaagaaaaggcaatcacagaatgatccagggaagcagcattctaggccaagggtacagctggtgcaaaggccccgaggtgggaatgagcttggggagcagaaagaggccagtgtggctgggaggaaagagtagactgagctcaggcggggcctttttaggccatgctggggagactgagttcccatttaagggagatgggaattgctggaggattaggaaggagggagacacaatgtagtttgtcccgcagtgccctctggctgccatgggggaagaggggaagggggcagggttatctgaggagcagttgacacccagaaagtgtgtgactcaccagtcacccctggcctagggatttctgctgtcattgtgcccatctcagctggtaccgaatggaggccgctgagagcccaaggacatcccaagggctgtgggtagtgagaggctcctggaaaggggcttggatcaggctgaggccggctacagggggttgtgagtgctgccagcctgttattgtctctttgagacagatgctcagtggcccagctcctctcggctctggctagcaaggctggaggcagcaagagccactgcctgggctgactcctttggttgcgcatgggaggcttcagcctgcacctttagtttttccagctgcagacggagactgcccctgaccatgcactgggatttcagacaaagcctttcctgatgtgcgcctcagtctcccctgggctggagttcagctgatgcttaccctggggaggttgctgttctgaggacagccatcccctcagcacccatgaccttagcgttactctgggcgagggaagcagaaggaatactttattccacagatggcttcacacagggcagagaggtgagagtgagttcctggtcacatcatatggagagccatatgggtgaggacctggaacactgcttcacaccttttgccttgaaacatcccctttgtgcatccctcccaaggctcaactactctgggctctattggccctcagcccaggcaagggctctgggccccttgcctagagtagagctcaatgctgctccttgtccatctagccccgggaactgaggacactggcctgggcccggtactggcagaaactcagtcctgcttgaagcttaaggggacatggcagggcaggtaggtctgggatagcctgaaccagtttctagaaggtacagaataccagaagggtcatccaagaaacccttgatttgtcaatagtcttagctttggcctgcagatagagccactgatatacttacatagcttcagggagatcaggcagaaccaccctgacaggcttcacttctgtgcctgggcacaggagatggagaaatcctgacaggataggggctcaagccccgtggtcctgagtcaatgccttgctggcctgtcgtagtgagatagcttgtggacagaattcaggcagcaggctgcaagcctcccactccttctcttcctttctaggttccccttggggtctcagttgaggaggtgacctcctgtctcctctggatgtgccaccaaggaaaccaatggaaatagcaatggcagcagcagggatgtagggcagaccagaaagatttccttactcagctctaatccccgagggttcctggtgtcctagcaccagggcctggtagcttagagcttagcttgaaggtgttttaaatctgcgggtcgtgtggtgtggtgtggtgtggtatggtgtggtgtggtgttttgtgtgtgtgtgtgtgtgtggtgtgtgtgtgtgtgtgtggtatgtggtgtgtgtgtgtaatctgaatttaaggaggttgttagaactctaggtagtctatgtagagagaccctgtctcaaaaaacaaaacaaaacaaaacaaaacaaaacaaaaaataaacaaaactctggttagtagtgatggactggggctacagatctctcttcccagccctcttctactcagtgtttgaacacatagggttaaatgattttaacaggtgtatggtagcccccagttaaatgctcaggaatccccgagagcagaacccactttcctttctgggatcacataggtgcaaagtcttcctggagtttatgtctgtttcctgtgtgtctgagttggtggcctggggcatgcttggcaggtacaggggttcatgtcctcatatccactctgcagcttgttctgctggattccagaaagctgggctctctcctcctcctctgaacccagatagatctctcaggaagaaagaaggctgctgggggccacctaggctcacatagtggagcaaggaagttacaaaccagtaaccgaggtaaagccctggcactgcctctctgcagttttccagagtgttgaggggcagggctaacctgtgtctctgcctgaggtcactagggagggtagcctagactacaaggggctggggcagagaggaaagaactgccttcctagccaggatgacttgggcagagcccgatgtggcttctccagcttcagtttccccagagagcttctcagaggtctttcttgagttcttctttaagactgggtgaactcctgggagggttgccatggagaagggttcttctttttttgttttttcgagacagggtttctctgtgtagctctggctatcctggaactcactctgtagaccaggctggcctcgaactcagaaatccgcctgcctctgcctcccaagtgctgggattaaaggcgtgtgcctggcggaccccttctttatggcattgccatagtcagtgcagcaccgcccccgcccagcaccctggacagcggcccacgctgggctcctgtggctgacagttgtctctggcatccttgaaatcaggctgcacttaggttaatttccttgatttctctcttagagaccccttaaaagcaacccctgggtcattttactctgctagttacaaattcggattcctccctattgtgcagactgggctgagaatgtgtggagaatcatatggctggccaagaccagcctgggttttgtctccttttactagcgggaatacagaggggtcttcaagagctgctggacacttgcccagttcctcactacccaggtctttctcaaaggactttggtggattctgaagggtagaacagagacccaagaaggaataaggaaggcagtggctagggtaacaagccaggagccagaggacagcagccgggggctggcctagccactgaagtgagagtgttacaacctgaacccgttctgcaactgaaagttactaaagatataatcatgaccattgcccctgcccctgacaagctgcccctgtattggtttcatagggctttaggcctttagactcttgccctgtctgactgactctgtctttctctctccatcttctgtcaagcagccctaggggctggcagggacgggtggaaacagtgaccgacatggatgaagagaagctcccatgtgagctgcacaaggaagggagtgctacccaggaggaccacggcctggagcccgaagaggagcctgggctccagaatggaacagcagccagcgaaggcctgagcagccacatcagcggcccaggcggtgagaagaccttagagggtaccatggagcctgtgagaggcccagatgtggccctgcctggccttaacctctctttgaccaatggcctggctttgggacaagatgggaacattttggaagattccatagaatttaagacctggagaagcggaccagcagaggaggaggatgtccctgggagtccctgtccagatgctggggaccctcagctggggtgagtgggtatcctgggacaggggcttacatatttctagctctttgatactacaccctggggccagccccttagcctctctagaagtctgaggtttcctgtcctcattttcagcttctgagtgttaacaacagagccctacaggggaattcagaggcaaccaggcttgctgtactcccagcccttggcccccacaaaccacagcgagcagtctccacgaggggctgtagtctgtctctaccagctgacatgaaagctttgagtccactcaaatatctagatgggacaggtgggttatctgttccatttttccccaagatggccccaggtgggcaagctttgtattcctgcctttcccaggggattttcctggaagtttgataagttgtatcaggaactttgtgtaggtcctactcagtggagttacggcctgttcctcagaagaaggtagagggactggtcttggagtacccctggacaaggaggaggggataggcaggggatgtctaaaggccagggagggtgggaagaacatatgcagacatcttggagagcatagctgtcggcctgtcttgcctgaatgggcaaggtgtaaatatgtatagggggtacatgtgtgtgtcctgcctttacagtatacatgcacaggggtatgtgaacatgtgtggaggcacatgtgtgtgcttgtgtgcctaacttgcatactggaatttgcacaggaggtatgtgaatatgtatgaggcgtgtgtgtgtgtgtatctgtatgtgtccagccaatacacttaattaacatatgtgcaggagtatatgagctttcatggggtgtgtgtatgcgtgttcagctcctagctagagactggtggtgtggtagctagccttagtgtctgggacagctaagtaggatggtgactatgcccttgcattctataggctggattgtcctggcgaaccagatgtacgtgatggcttcagtgccacttttgagaagattctggagtcggagctactgcggggcacccagtatagcagcctggactctttagatgtgctgagtctcactgacgagagtgacagctgtgtcagcttcgaggccccccttacacctctcatccagcagagggctcgagatagccccgaggccggggctgggctgggcaatggggacatggggcctgaaggggatctgggggcaactggtggttgtgatggggaactaggcagtcccctgaggcggtccatctctagcagccgctcagagaatgtcttgagccacctgtctctcacctcggtgcccaatgggttccatgaagatgggcctgggggctcgggaggggacgatgaggacgatgaggacacggacaagttgctgaactctgccaggtgaggcgggagtggggtgggggagaggctgggctgggatctggggagccatgagtgggtaggggatggagagccagaagagtcaaggctgtctgtctgtctggatgctcccctgctgcagtgaggcctgattctctactctggccccacagtggattttcagagacctggggcccctcctagccacacacagcgagtctgactccctccttctcatttgcagtgacaccagccttaaggatggcctgtcggactcggactcggagctgagcagctctgaggggctggagcctggcagcacagatccactggccaacgggtgccagggggtcagcgaagccgctcgcaggctggcccgacggctctaccatcttgaaggtttccagcgctgtgatgtagctcggcagctgggcaagaagtgagtgcgtctccccagcttctatcccaggcaaagcagatcctatgccttcttcagcaggaaaagggtgtcagcaacttctttcaggggtggctggtgccaggagctcccactaggctttcaaggatacctcctcctgtcactgtcctcattcttgacctcgccctaaatctgtttcctttctgggctacttgggcgaaggtggttgctgtcagggaggggttggtgacaggaggcccctcagggctgaagcaggatgggggatgtggttatggtgttgtgaagggcagtagagaggacggaataacccaactgaaccagagttctacccagtggagctaggtgaaaagaagaacctgggagggatttggtaaatgtctgggccctgaaggtaaaaaaaaaaaaagtgtctatcttcattaagcctgtctattgggaccaactgaaaggacccccacacctgaaagcacaggacataatctttagactgcatgcaaaggacacccatgtagcagtcttgggaaggataggtgacttggagtgtgtatgtgagagatgaagatggcatgttctgagtatgtgtgagcatagtgtggccccgaattggcccttctgttcacagggactccaccaccccaggaaggcttggaggtgggtggagctggctagcctcccatgccactcacaaagctaagggcgacagttcagacctgggtcaggctgagatgagggctttaggtcttaggaggccttccgacaccctctgacatttccttgtaccttgggtagtggagtgggttcccaggagcccttcctaaaaatcacaactcatagactcctctggctgaacatctccaggtaggtggaacctgagaacagcctcccatccttgggaggatgggttcttgtcatgtttccatggcgccctctgcaggctcctccagtaattgctgcagctcatccctcccatccaatttggagggctgcagggaggaaattcccaactcctcatctcatcttgagctctcaagttttctgccctggatcgcttttgtacccttcctttcttttcttagttcttctagatgagttcttgcttttctgtttctcctgtagaaacgtctctgctcacgcctccttcagcagcagacagacacgctagccactcgtttctatttcaagttttcattacgaaccttacacacacacacacacacacacacacacacacacacacacacacacacacacacagagagagagagagagagagagagagcagattaaacattaaacttttcatacactcattatgcaacttcaaactgttttgaggtatcactatgcagccagagctggccaccaaatccccctgcctcaacttcccaaatgctggcattacaggtgtgcttcatcatgcccagacctcagctttgatgttctcccatcatacctcagcttttctccccatctgttggaagcatattcagacacattattatttgacccacagtgctttaacctatttatagctggtaagaatttttatgttgttccattttaacatttaacaatattaacaaaaattcctcattctctcccccatttggtgtgtttctctttctctagaaaacattgatttggtcaggcctggtgttgcaagcatgctatcccagctactgggagcctgaggcaggagggtcacaagctcaaggcttgcctgggctacagtgagttcaagaacactcggggaaactcagtgagactcaaaactatataagataaaaatagggcttgactgtagttcagcatagagcaccacttgtcttatgtatgtgaggccctggggtcaaccctccttctcctcctcctcctcctcctcctcctcctcctctgaagcagaagcaggagaaggaagaaggggatgaagaggaggaagaggaggaagaggaagaaggaggaggaggagaagaggaggaggaggaggaggagaagaggaggaggaagaggaggaggaggaggaggaagaggactggagggttccctgggcttgctgggcagccatcccaaggtaatgagggagccccaggtcccagtggtactctgtctttgaaaaaaagatggctggctccagagaatgacattccagattgagctctagccacacacacacacacacacacacacacacacacacacannnnnnnnnnnnnnnnnnnngaggaggaggaggaggaggaggagacaagaagaaaaaagaagaaaatgtgtgtttgaatcaggtctggaatactatccacacaatgttcctggccctctggttcacacgtgccatttaacagacaacttctcttttttccatttcccttctctccacctggtcctcctagtctctctctgtgtggtgcatgcatgtacctctgtatgtatgcacacatatacacacggaggtttgaggttgatcttgcgcatcttcctctgctgccatatgttttgaatcagggtctctcacggaatctggagttcactgactagctcagctgactggccagcaagcggctgggatcctcccatctctgcctcctcagtgatgagattacatgtctacaccaccatgcctggctttttatgtaggtgctagggatcaaaccccagatctccaggctttcaaggcaagcattttaactctgagaccatcttctcatgtcccctctcttttaaagtgccatatataaaagaaacagccattttcccccaagggttccccacattttgggtgtgcatgtggcttatgtcacatatccttctagttcccatgatcctaccaatgggaaggaaagtgtgaggctttcatttcatttcatttcatttcatttcatttcatttcatttcatgtttttatgcttcatgaaacatgctcttccttggcctccaggagggcacagacctgccctctggtgtcacaaggtcctcttcatttgctctttccttggtctagatccttaatggggctgctttcagagctctgccctgggctctgcacattagaagaaaatatttatatttttgtgtatggatgtgtgtgttgtgcgattgtataccatgtatgtgcagatgcccaaggaagccagaagagggcgacagagagccactgtagctggattgcaggcagttgtgagatacctgacctgggtgctgggaaccaaactcaagcctctgggagagcaatgagcgctctaacccactgagtcatcacttcaacccagtctggccactggctcagtatgatcttgaactcctccggacactaccatgctgggaattgaatccaggactttgtgcatggtaggaaagcactctgagctacatccacatttaacttttacttacttttgagacagggtctcatgtagacaggctggtcttatgctcctggtccttctacctcacagtgctgaagtgccaggtacacatcgtcacactaaactccctgctcccggttctctcaaaggcagagatcttgaaatgccaagttgcctcttccaaggttcccctcacagggattcagccacttgtgttctcatcctgagctctgacatcaccttctcagtcatttcctttctggtgacctcagaatcctaaatgttctcatcttggccccccttttctagacccattctctgtgttagctttaaactctgcagccatgccctgatccttaccgtgctctgaggccgggggtgggggcctccctcacctctgctgccctcccgttggtggcttgatttacattatgtcattgcatcaccccaccctgctcgcttccctgaacaggctcttactgagctggccgagacattatctcccgatgccacagaccaaggttgatctctctgagctgagggtccagaggggaggcagcccagggtctgggtaaatctggatgggagttaagggtaccttggggcccacttcctcagtacctgatgtcttgggacttggggtctgcctctaactgacaccccattctactttcttggcagcaatgagttcagcaggctggttgctggggagtacctcagtttcttcgacttctcaggcctcactttggacagagcactcaggtcagtggggctgggttgggacagtatccacaggtggtggaacagcatgtctggcttgttattctagctctctatttttgtaatagacaatataatatctgtattccagcaagtctatcatgactttttatacaaccttttgaaagtcttgaccccactggtaaagctgtggggagaacctatgggtatctgttgtccagcaactcagtgattgccagctaatgtgatgggtgatgaaggacatgaagattcatgtatagtcacagctcttcaggaggccaatggtttgtctgtatggagcacttcctgcttgccagataccataggtctttatattcatgacctatgtttgtttgtttgttttttgtcttttgaggcagggtttctctgtgtagctctggctgtccaggagcttgctctgcagaccaggctggcctcgaactcacagacatccttctgcttctacctcttgagtgcaaggattaaaggcattgggcactaccatctggctatctctggcctactttgatggtataggggacttgactgcagctattttagtgtctgggtctcaggagggtcaggcgtgggccttgggagcaggaggggtggtgtgggtgaatggaagccagtgtcatcagaaagatgctcggccaggtctgaggagggaaggatagcatctcagagctaggggtgatgtctacagatgctaggccctcttgctggatcccagatgtctcctaatactctttttgacggtcagtttctattctgtcttggttgggatgttttccattgcttttcagtatacttaccagtttgccacgtccaattgcaaagaaatgaagctaataaaaaactactgaaggactgaagagatggcttgcaagagtagcaagtgtagggaccatggctcagacccctggcatctatgtaagtgctaggtgggcatggtatctgtcactccagagaaagctggctagcgaggctggccacatcagcaggttctcttggttcaagtgagagacctcacctcagtacaaaaagtaaaaagcaatcctggaagacacctgatgtcaccctctggtctctgagtgcttgcacatgtgcttatgcaaattcaagcacacataccctcatacatacgccaaagaaacattatcaagtttttttttcctcagttacattttacattcctagaatttccatcgtctttaaactttaaaatagattccagttctctgtgggactccccatctttttactaacacatctgaactgtgtataccttttaaaaatgtattccttattcattcctctgtgtgtgtgtgtgcgcacatgtatgtgtgtgaacacatgtttgcatgtgtgtgcatgtttgcatgtgtgtgtgcatgtgtgatgggtgtacatgttttgtgtgcatgtttgcatgtgtgtgcctatgtgtgcatgtgtgcacgtgcacatatttgcatgtgtgggaactcatgtgtggaggctgagattgatgtcgggagtcttcctcagttgttctccacactattgattttgggcgagacactgagatgaatccagggttcacagatatcactggcctggcaggtcagccagctccaggaacaacctctgcctgccttctaatcattgggaccacaggcggccactgtgcctaccttgcctacaggtttggggatctgaactcatctctctagtcctgacttggtgtttgcatctgttttctgttttgttttttctcttggttttccagcagccattgttactcttagtttgtccaacacttcctttacacaactggagaggaacacaggacacagtcgtagcccagccagggctgggctgaggagaggcagcttcgaagcgtgacgcctctcaggattggctctgagccttagctttgcatggggagccatgtcaccaaaactattctgaacctttgctttccctccttcttgcagtaaaactcccctcctcctcctcctcctcnnnnnnnnnnnnnnnnnnnnccctcctcctcctcctcctcctcctcctcctcctcctcctcctcctcctcttcctcttcttcctcttctttctcctcctcctcaaaaaaaaaatctgtctacctctggggttcacagctccataaccttcatgccttcagagtctggcaactgtgtggccacgtgattacaatccctcaaggctctgggtgtgtttttcagccctgcagaaggatccagtgtacggccttttgcccatgggctttgtctgtgctacacctgtggaaaaggtggctgtcatgagtcagccagcttctgtcctgttctctccatcctgagatcaggggaccttgttgcttcacctgtagcttaaggcagtgcactgctgcactggtggggatctgtcttgctctactccaagcagatctatcgtgagcggaacctttggattgcatcaaaatgacggagatcagaaagatagtgttaagtgggtctggatcgccatcacaggtgctgtgctgagggccttatatgtggggtcactagagtgaaacgtaactgtctagaacttggagacccacagaggcactgggtgtgaatatcatatccctgcctgaggtcttagaatccagaggctatctcggagggcctgcctgggcctgcagaggatgtctagaccctagtacaggaactagcctcatgtgtatgtttgtgtgtggggaataagtcctttatcccagtgagaagactgtatcaggggctctgagattcactcagcaaccatgaattccatcctagaaccttcctgaaggccttcccgctgatgggggagacacaggaacgagaacgagtccttacccacttctctcgccggtactgccagtgtaacccagacgacagcacatcagaaggtacagtgttccctggtcaccttccatgagtcttgcctgtctgagacctggtcttcccccaccctggcccaggtaggccacatgctctggcaaatagtaggtcctccattcagaggggatgaatacaattaggtgtccccacagcacactcatgctcgaaaccccaggggttggcaggatgaaggcaggagaacgattgaaagcttgagacactgcctcaaaaaccaaaacactaaactgcccagggattatgggatggcctcctggacaagagagcccatggtcattccattcctaatgcctgcacctagcctcaggcctgagcttttgtcggggaggggatatgcgatgcaggtctcttgcagaggcaggatttaccacatggatggacctgggtcttaggaactgatggactagggctggagagatggctcagtgggtaagagcacggactgctcttctgaaggccctgagttccaatcccagcaaccacaaccacccgaaatgagatcagacgccctcttctggtgcatctaaagacagacagctacagtgtacttacatataataataagtcaatcttaaaaaacggggggtggggtgggaactgatggactgaatcccttattgctattgtagggacatagtttgaagtccagagccttgcctcggtctaaggttcaaggtgattttgtctgcaagaggcagacatctgggttagagcatcatccaagccttggccctgaaatgcttgggagcagatgtccacctctctttgcttctatggccttcagcctgactctatggggaggcaggtgggaggctccgggtgggaatgagtggattctcacagtgaggatactattgtgttctatctagatgggatccacacgctcacctgcgccctgatgctgctcaacacagacctgcatggacacgtgagttgggggtctgtcaaggggacatatgttctcactggctcccggccattgagggccaaccctgtagccagccctcttgctgaaattcctgatcagggtcaggttgttttgcccccagcagacctgagaggtgggcaccttgcttctatatttgtccctgtcctgttttttttttttttcctccccactggctctacccgggttctgactcctaaggcggagaatgagagcagctgagatacatggaattctttgttttgatttttgagacatggtttctctgcgtaaccctgactgaattggaacttgctctgtagaccaggctggcctcgaattcagagatctgcctggttctgcctctcaagtgctgggaatcaaggcctacgctaccaccacccagcaggggcattggaaatttaagacacggcaaatagatgtgccctcagggcaggaccacctggtctgtggaagtcctgccttgttccatcgaaggctgtatgctcttccatatcgcctttaaaagcccagatgtggccttccttcaatgtcatgccctagacaactggtcgctgccaaatgacaggttactcctaaggggccttctcctcatccccatcccccagctcctgtcaggccagtgagtggaaggacgcgggtgctcaggccccaggctgcctccaggcttctcacgctcactaattccttttccttcctctgttggctccggctctgggctctcctgccctccctgcctcaggtggtaagtgctgctgtcagagtgtgcatgctgtatgcttagacctgcctccttcacccgctgtctcctatcacaccctctgccccacccaactgctctctggccatcactcactcaggcctggtcagagccctcttgggaggtgggtacatttcagtgactcagtgacaggtctgtatgtctggttctaagtaaaccagaaggttccaggagtgttaaaagacgaatccgggatagaaaagcttcatgtctgttcttgccttcatggggtagttgtgtgatcctgggcaagttgctgcccctctccgagtctcagttcggcatcttctcaggacagtgatggtctcctccagtgacttggtggggactgggagtggcctgaccctggcaagggttttgctgtgaacaacacttccacaaacccatgagaggaacaccacacagctgtggtgttcattgctactcttaaaacttgagtgatggatgacccgtgggtacagccttgacgctggcggcatctggagtggccgagggagaggaggagaagccaaggctgggcttgtgggcatgtgggggcacccagctggggatgccaaactgtgacaaccttagcagaacctgagtgtgggatggagagaagacacggatgtaaatgctgtgtattccctgtgagtggaagtggagtgagcgcccttacaagccagcctttcccggggactgctcctgttcacagctgtgagcttcagccacttgaaaagtagtgtggaagtcacccctccatgctgcccccactctcagcatagggacccccagcatgcccctttaactgagctcccatgaaggagtgtgcctcagtgagcagtggggagaaacctgggttagggttctccatgtttgcccatagcacagctttatggtcccgaacaaacccttaactcattaagcttctatttatttccccatcttgtgatttcccctatttgtgagctttttttttttatgatttatttattttaaaaagtatatgcattggtgttttgcctgcatgtctgtgtgagagtgtcagaccccctgaagcaggagttatagacagttgtgagctatcatgtgggtgcgggatttgaacttgggtcccctagaaagagcagccagtgctcttaactgctgagccatctctccagccccttgcctctgagtcttaatgcatacagcctagagagcactttgccaaggcccgctggttacattaacagagcttgtcagaggactcaggtacttctgccctttagctctttgtcagagacaataagatccaggtggaccgtagggggtcttagcaatgtcatctctgctggtgcccctagagagttctagtcagagagggaggctgattggcttgtcagagggtgggaggcaggaagacttcctggaggtgtgtctgaactctgggattagagagctggacctcaggatgaagaagaggcggagggaaaggtgggtctcaggggagcacaggctgaaagaggaggggcgtgaagctgtttgtgggcaggtggacatccctgggacacatgccgtggtttgatgccttgctttaagacttccttccaggcgagccataaaacaggctagtattgttcctatctcagtgccatgccaggctttcaggaaaaggccagctgccccgtgtctgttacaagtgaccaagtgactaaccacagccagcctctactctgggcaaggacacaagcttagggagccggccatcctagcctgagagaaccagggtcacagcccgaggtggggctgtggtcacactagctgtggcttgttcctgataggggacagaggctgtgggcaagagagcccagggcccaggcccaagggagtcctgctgaggaaaaaggagtccagaggaggagacccgggaggagggttcccagtcaaatctgtgtcccctgtccctgttcatgtctttttgcctagctgtctatcactatttcttttaaagcaaatgacttcattggcacatcttttctttgtaccttggtgagtcttgctccttggcccagagagagatgaactttagtgaaggggttgagtgggcttggagtgtattctctagagtgaccataatgtcctcaaatgctaatgaggccgggcactccatgttgtgggaatctctacactcactgattaatttcattgtggcaaaatacagcagaaagccttgactatttcaaccacttaaaaacatgcaaggcggcggcattgagtggacattcccaggggtgtgcacccagcactactgacccactctggaatttttcatcactctcaaaataagccccaagccccccagcagtcccttcccctcctcagtcacacctcctcccccctcactccccagtcgctcctcctccctctccccagcccctctaatgcagatctgcttcctgtatgagctgtctgttgtagccacgtcatgtgagcggaattaaccatacagcatccgaccttctgtgtctggtttatttcacttgatgtaatgtgttcaaggatccttcgtgttgtagcatgtgtcagttctctatattcttgttttgggataaacagtgtctcattgcatggacatgccacataggacatatgtgaatatgcatgtggagttatgaaaatttgcgtgtaagttttagtttctacaaatattttcaaattttctttttgagacaggctctcattatgttgccctggctggcctagaacttgctatgtagaccaggctgggttcagacttgttatgtagaccaggctgaactcaaacttagagagctatcaactgcctgtctctgcctcccaagggttgggattagagacatgtgttactacacttatctcaattattttttaaattatctttaaaaaacccacttattttcttgtgtgtgtgtgtatgtgtgtgtgtgttgtgcacatgtggaggtcaatgttcaacttgcaggggttggttctcctcttcttctatggggtctccgagggatcgaaggaagatcagcaggtttggcagcaaggcttgctcactttatcttatttatactcttatgctatagcgtaggctggacatgaactcataactctctcgactcaaccttttaaagtgccaggcaatgggcgtgcaccagtctcctttgtccaatttaaatgactgtttttgcattccattggcttcctgtattcaggccaccagacccttttcagacagaggaactgccagtgttttctctcatcctatcggttattaatttattctttctccctcttgatagagtcttgtgatgtagaacagttttttaaaatttgaatgacattcaaatttatcttttctttcctctctgtgtgtatctatagatgtgtgtgtgtgtgtgtgtgtgtgtgtgtgtgtgtgtgtgtggctagagctcaatctggaatgtcattcctctggagccagccatctttttttcaaagacagagtaccactgggacctggggctccctcattaccttgggatggctgcccagcaagcccagggaaccctccagtcccttcttctccagtgctgggattatgagcatgcgctaccatgacagacttcttgtgtgggtgctggggattgaacatgggtcctcaggcttgctcatcaggtgcatggctgactgttctctcactatccctgctgtctgtctgtttgtctgtctgtctgtctctggtctctgtctctgtctctgtctctctctctctctctttctttccttttttcttactttgtgttttgggcatcataaatcaaaaaccattaccagtgttggggaggcacacacttttaatctcagcacacaggggacagagggagatggctctctgggagtttgaggtcagtgtggtcagtgggggttacgtagtaagactggaacaaacacccaaacaaacataaagaagaaccagacccaaggccatgaaggtttacccctattttcttcctagagttttagttcctctgcccagttttgaattttttttttttttttttgttttcttccgcactgagaatcagccccagggcctctcgtgtgccaggcaggcacccatccaccgaacccagctcaggttttaactctcttctgagtagggaaatatgctgtgaggtacagattcaacttgagtcatttgcatttggacatctggtcccagtatgatttatgcaggtcatcctcccatgatacagtcttggtagacttgttgagatctcgtctattgattgggaagcttggtgttacgggtaccggcactcaacactcaggaagtcgaggcagaccaaacaggagtgcggctattgcactgcagtacatcctatcgcagcagacaacaacaggaacaacaagttgattggttgtgaaggacagggcttgaggctagggagctgagcaggtagagcactcgcctggccttcatgaggctctccgttccatgcccagcattacataaaactgaacgtggtcacacactcctatgatccactcagaaggtgggggcagggtgatcagaaggtcaaggtctatgtggggcgttcgaagctagccggggctatataggatcttgtctccgacaaactgaatagtttactttctgacttctaattagcttccattcatttgcagctctggtctcaagcgaatgcccagagcttcctactggggctttctagtaagttctcaggacgtttcacaggtgaagagtctgttcttcttggctcgagactgagccagggatctcttgcaagcccatacaaatgtaaggctcagcccgtgcatttctgaagagagaggggggtagagagattttgatggagattaccttggaaattccaggtcggttgggggagaattatcattttagcaatgctaagtcttcctaatccacggacaaaggatgtctttttgtggatttatgtcttcttaatttgtcttagaactcttctatagttttgactatacaaccctttcatctccttggttgaatttttttttttaaaccagattctcaggctgtaactcagaacttgaactcaccgtgtagctcagagtgtctcaagctcactgcgagtcgccttagctttctgggtgctggagttacagatgtgagccctcatgcccaatctctttggttacgtctgttgttcatcatttaattaattaattaattaatattttttggagacaggatctcacgtatccgaggctgttttggaagtcaatgtgtagcctgggatggtctggacctgtgccttctttgtgctggaatactaagagcaagcaagctgctgtgcctagtttatttgactcgtgtgtgtgtgtgtgtgtgtgtgtgtgtgtgtgcgtgcacacacgtgtgcgcatgcatgcgtgagtgtgtatggaggtcagaggtggacattgggtgtcattttccagtcaccctgcatcttattttttgagacagtatctttcactgaatttggagctcgctggttcagacaggctaggcagtgagcctcagggaccctcctgcatctgtctccctagtgttaggattgcaaatgcatattgccatgctggcctccacgtgggcactaggggttgaactcaggtcttcatgcttgtgtgacaagtaccttactggctgagccacttctccaacttcctgattttaccctaatcggtgctgttcattctctgattgttcacaactactgtacacaagtacaacgggggccagaaagatggctcagtgggtgaggctgcttgatgcacaagcttggagacccaagtttgttccccagaaatcatgtaatgacagaagtagagaatcagctctacaaagctgccctctgactgcccccaccccaccccgtatatcacgcacttacacacaataacacatgtaaaacctttttttttttaattaaaaaagaattgagtttgactgaagcagctcagtgggaaaaggagcctgctgcagtgcctgatgacccagtctgatccctgaaaccgacacaatggagggagagaatgattcttacaagttgtcctctgaccttcagtatatgctaagccaagtgctgctgtcccccaaatgtaatctaaaaaacttaagtctagtgccagatattggttatctatttttaagttgttagtggggctcccacccataggcctccaacatcacaatggctatcaccattgatcttggttatcttccagagcttgattgtagacccctattgttgaagacacccatacttatgtcacagaacatggagaattcaagctggtactgacctggacgccttatccctgttggctaggtgtcataatactggaaggtgctatgcacattattcagggagataagtcatcaacaattttacccaactgtgaactctgcaaactacaacatcaactggcccagacagataggcttactgctacactagtggcataaccattacgagagtaaccaactcctggttggttatgcaagaaacctacactttctgcttggacttaaggcctatcccacaagacagaacacatgccttgttcctttaacttcgccaagaatcaattgctagtaggtcataggccttagaggagaagctactgctattattctgtcatgtggacatagtattaaaactcttctctaagtacttacttttccatccatggattagctcatctatcgactctcatcagagaaccttctttttgttgtagatggtgactcttgcagagacctataaatggtcaatgggcagagaaagaaagattgtggagtgtttacccctaaattggtaatcagtaatatatcccctaggctcagggattaccatggaagaggggacacaaagagccagaggtactaactgcattgaaatagtgttttctagacatggaagggcagttattcaccagaactcacagcagctatgactgcatgcataagcatgcatgactatatatgattaaggcagcccagcatggatggggaggggcttgagaaatttcacccctagccaaggagctattggcaattgatggctgctggtcaggggagagtcagtttgcctcagagacacagctcttgtgaacaccggtccacacacacatgcagcagtgacgggaactcagttggtttatgaaaagagcatgtgaaattgggaggagaaattggtggtgaggctagggaagcattggagggaagggtatggggtagacttggtcaaagcctattatttggatgtatgaaattctcaaacagtaacaagcctacactgtctatgtagccttggcttgcctagaactagactggcttcaaaaatcactgagaactgcctgcttctacctcccggtgctaggattgaaagcatgcactaccacaccttgtctaacacaagtgatgttttaaaattttcttgaaaaaaagaaatacaactgatttttatacatcgatcttatattttgcaatgtcaataaatgtgttcattagttttaatgatatttctggatctttagcattttctgcacataaaatcatggcatctgcaactaaagataaagaactctctcctttttttaaaaaaaatttggatttttatttgtttttttcttgtctattcagtctggttaagattttttttttttttttggagacagggtcctccatataactctggctgtcttggaactcactatgtagacctggctggccttgaactcagagaaatcatcctgcctcagcctcccaaatgcagggattaaaggcatttgctaccatacccagaatagctagaatttttagtataatactgtatggaaatgtttctgatcttagggggaaaagcttccggtcttttaccactgagtatgtcagctgtgggcttttcataagcacccttcatcatttaaagatggtccattctgttcctagtttactgagtatttttccatttatttatttgggaggggatggtgggcacaccgtgcatgtgtggaggtcagaggtcaattctctccttccgttctgtggacccagggattccgactcaggtcattaggtttgaagtgccttcacctgatgagccatcttgtaggacctatgtttagtccctttaaggtgctgatggatagtatcttgttaaggattttcgcatctttatcctaaataactacttatctgatgttttattttgtcaggcactggtatgtcccacattacagagtgaattaggcttggttaatttgttctttaactattctttaaagctcatctgtgaagttatttcgtctttgcctttcttgtgaggtttctgattcctgatctaattcttgtacttgttataagtttatttagctcttctatttcttcttgagatagtttttatagcatatgttccctaagagtatgtccaattcttccaggttatctaacatttttggtacctacttctttcgtattcttgcttatttatttacctttgtctacttgatcttcttatgagtgagtagcgaatgaaaattaggacatgagtgctccaaggtgtggttgtcaatgtgagggagagtagaaccagaggcatccggaagggtccagtctgaacctggccatgagaagagggggctggggagagtgagaaaggaagagaagagagaggagagagggcaaggggaccaagagaggaggtgtggaccaagagccaagatggagccagccatgagccaagataggaggagcaacagagcattggccaaaatggctggattatataggaaagagaagccggggaagagaagcccaggccctgggctggagaggtttagggttggcagcagggtgagaagtgctgggagaagcccaagttctgagtaatttttgttgtcttagggtttccattgctgtgaatggacaccatgttcaaggcaactcttataaaggacaacatttaattggggctggcttacaggttcagaggttcagtctatgatcattatggcaggaaacatggcaggatccagacaggcatagggctggaggaactgagagttctacatcttgttctgaaggcaagcaggaaaagaccagcttccaggctggagagtctcaaagcccatccccaaagtgacacacattcttcaacaaggccacacctactctagcaaggccagacttcctaatagtgccacttcctgggccaaccgtattcaaaccaccacgcttgtcttgggtttctttgggacctgacaaatagtattaatatctagaaccaaaactgaatgtgtcatcttttgggtctatcaagttctgtgtcatatgtgcagtttggtacatatagatttgtgatgattatgtttcctgctggtatgatgctttcatcactatgtcaacactactctcttaatcttttaaggcttcacatcttctgctcagccttatacacattagtggatttgcactggagatgccttgctagttgtatgctgtatccttttctaacttttggctttcaagatgcctgttcatttttatttagagtatgactcttgcaacttatactttacaaatattagctctaataacatccttttaacttgaacattaaatgagttaagacatgttttaacttaaatataccaagttaatattagtgttttggtttatgcctttaatcctagcactcaagaagttgaggcaggagaatcacttagagtttgaggccatcctgggttacagattaagtccctttttcaaaacaaaacaataagtaattaaataaatgaggcaagttgctttttctttctctcttacttttttttttcttgagacaaggttttctttgtagccctggctgttccagaactagctctgtagaccagggtggccttgaacttacagagatctgcctgcttctggctctagagtgttgagattaagtaatgtccagttactttttcttttctgttccattcatctgttctttctttttttcctcctttttttgggtatacttttggatcatttaggtgttagttagatttctattttccttctttgctagcttcttagttgtatactcttttagaattctttttaaaaagtctttcttttgtggcactagatatttaacccaggcccttgcacatgctaggcaagtgttctacccctaaactacatacccagccctcagaattctttttctggttcataaggtacatttctgacttgttagaagtatgtttatcacttctggggccatgtggcatctaaagacagctaagctctctcagctttctctctttttaagtttgctgcttctccatgtttcctgcttctcctcacttgcctcttctttctccaagcttcctgctttctcatactttcttttccccatcccacctatgtcttcctgctgtttgatttcccatgcctcctgcttctccacacttcctgttacccatgcttcctgtttctcctcgcttcctgtttccccatgcctcctgcttctcctcatttcctattttcccatgcttcctgcttctcctcacttcctgtttccccatgcatcctgcttctcctcatttcctattttcccatgcttcctgcttctcctcacttcctgtttccccatgcatcctgcttctcctcatttcctattttcccatgcttcctgcttctcctcacttcctgtttccccatgcatcctgcttctcctcatttcctattttcccatgcttcctgcttctcctcacttcctgtttccccatgcatcctgcttctcctcatttcctattttcccatgcttcctgcttctcctcacttcctgtttccccatgcatcctgcttctcctcatttcctattttcccatgcttcctgcttctccatgctttcattctgaacaattcatccctgcatttctatttttttgtttcattttcatgttgacatatgactgagcaatttcccaggaccccttgctcttggtgggccctgaactccagtgtctgttcttaagtctaataggtaacttggttcctcagccactgggccatgctttgaggaggaaagtttcccagtgcgggctctctccatcccctgagtggcaggaactcagccttggtgtctgctttgtatttctctagtgcttttatacaggcattacactaatatttcagtcaaaacttctttccattaatttctatttaggtgtatgtgtatgttcctctgtgcatgtgtgtcacatgtgcatctagaagctagaagaaggcactagctccggatggtgcagttacagaaggttgtgagccacccatcgtgggtgctgaaaccaactttaggtcgtctggaagagcagtaagtgctcctaacctctgaaccatctcttcagacccctaacagttgtttgtttgttttttattggaaaagtatccttcataacaaggatatgtcattattaagatgaaaaggtgatgatgatgatgttgatgatggtgatgagatggagtcttatgtagcctaggctagcctcaaattaactgtactattgaagatattcttgtacgtctgattcttctgtgtccacttctcaggtactgggattacaggtatatactagtatgcccagtttatgtggtgctatggatctaacctaaagctccatactaagtaggcactctaccaactgagctacatcccctcttcattacatagatgttttttgactttgtactcttagtggctgagaatactcagtgtgtgtggaactcaaagacagtatttcctcatgtgtttgtattcttttattacaaacaaccatgacatggctatatgcttatgtctgcacacagggaatgtatacataaaaacacaacacagaaacagacaaaaatatcaaggcacacataggatcttttctttttaaggctttggaagaagttaagaaaattcttatcagctatatattaacctttacattgtttgggcacagtgacatatatacatatatcattccaattcatcttctagtgctatgataaagatggtaaccaaaagcaatttggggagaaaagggtttattgcgttacagtccatcatcaggggactctaaggcaggaactcaaggtaggaacttgggagcaggaactgatgcagaagccatggaagactgtttttattggcttggtcagcctgctcttctctctcgtctctctctctctctctctctctctctctctctctctctctctctctctctctctctctctcatggtctcgtgtcttccctccctccctccctccctccctccctccctcccttccttccttccttccttcctgccttttctcgttctctctttcttcctttctttcttttggggagcagggagaggttcaactctcactcatgtcaaattgacgaaaaaactaaccagcacatttacaatcccaacatttagaggctgtgacaagagaatctcaggtccgagggcagcctaggctatttgacgagaccccagtgccacagaaatgaagaagctagcaaataaggaatcaccttgcagaaatgctctccacattatttctgtggcatatggtgttagtagaggctttgttaaagtaatgccaatgtcgggaagtgtggggcagtgcacatgaaattctgtccttggagaatcccagcacacacaaacatgttcaaagttctgaactggggcaataaatttgctggactctaatactcttttatttattttaggaaatacatattcccatgccataggatgctaaaataaaataaaataaaataaaataaaataaaataaatatgaggaaacattgccttattttagcgaaccctgactcacaaaacctcccataggcaaagtgccagctagggcctcctccagtggggctcctccatcaactagttaacaagagacagaatttctgggtacagccatctctccccagctttttgcttgtatccaagcgaacctaagcaggttctatttatgttaatccaccttaatacatatcacccatgtgtgctggtggcgactgatttttggtctcataagaccaaactgtccctcagttgaccaacctctgggaggtcttcctgtcccactgtatgcaggccagagggttaggagaccatggaagaataatatacagagttcctgctcaagagccaagagacctgggttcaagtcctggtactcagtgaccttgggggtgagaacaggaactctgatgtcagacatactgggtccctcctcttccttcacacaccacttcccttctcatccttcaggcttctcaccttgtagcaaggagatatgataatacatgtgatagtcaatgcccagagcagagcaggcacctgtctgactcagctaccacgatgcttcacccaactcggtctctgcactgagtttgaagagagcctttctgtggatgaaatagaatttagaatgcaaaaggatttttaaattcttggagatgaagcagtatgtagacagtttagtactgccttcagtactgcctcatcctgtctatgagagcagggcagggcagggcggggtgtgtggaccacaccagccttcttccctactctcaggcagaaccatttctccatgacagaacattggcaagaagatgtcctgccagcaattcattgccaacttggaccagctgaacgatggccaagactttgccaaagaccttttgaaggtattatctgctaagggttctcatgctcccttgtcctgcccagcacgaatggagcaaaatcttgccccactaaatcttgacattctagatccataactttgggacagagttggagactgcctagttcctcacctgacttgtgtattcgccaagaaagatagatggtgaggctctgaggactttagttttagtgcttcaatgaccaccatctctagtaataactatactatcaccaaatgaaaaccaccactatcaccaattgttatggctgccacccacgaccatctccacaatcacaacctcctccaccaccaccacctccaccattaccttctccaccaccatcacctctactaccaccaccaccaccatcactgccacctccaccataaccatagggaaaggtccactcattcctctatcactggcaatgaaagaaatccatttttctttgaggcttcccaaggtgaaactttggcctttgtaaaaaaagaacagatttattttggggctatttatatatgatgagttattttttagatagtcttttcatagtcttatggtgcgaggaaggaaattgagtaattaatctaaaggaagatatatatgcagttattatgtgccagttacagaaactaaaagagaacattgtctcctcctcttttttttgctacaattatctgcttcaccatcaagaagtacttgatgaaaatatatctttaagctcagtctgggcagtggtggcacacacctttaatctcagcatgtgggagacagaggcagtggatctctgagtttgaggccagcctggtttacagagtttttcaggatagccagggctacacagagaaaccttgtctttaaaaacaaaaacaaaataaaattatcaaatcattacccatccattcatttcccactatctacttatcaccttttatctccttctccatccactcacacatctcctcaggcaggggtacaccatctgcccagccatgtaccccttttatctccttctccatccactcacacatctcctcaggcaggggtacaccatctacctacccaagtgccttacccattcacccctcatccagaagctcttgtgtagcccgggatggccttcagctcactgtgtagctgaagacagccctgagtttccgatcctcatgcctccacctcccacgtgctaggattccaggtgtgtgtcaccatgctggctttatgtggttctaggggccgaatcccagtgtgacacacactagatactgcactctaccaaatgagctatgtcccagccaaccacttcatacaccaaccactcatccactctaacatatatccatttactccccaacatctcatccatctacccatcctgtgtcattctggacttcctatcaaagacttattggtgagtgagttagacattattgaccttgggaagcttacaacctcctggctagacagacggtaataattgcctagccaactatcacccatccaatatacccacctatccactcattcatgcatcacatgacaccaagcaagtatgaatgaagtactcactttacccatttaactgcaaaggtgctccctcaccatggccacattgctggagagatatgagggtttctctgactctccacctgaactcctttctccctcccctttctcctctctgattcagacactttacaactccatcaagaacgaaaagctggaatgggccatgtgagtagatcaagggtatgaggctggttaccgggagagggagtggctgggcatgcagagcactctccatggtgctgatctatcctagcccagggccctgacagcccctaccctgctggccaacacccttgagtgtttatttcctgacttgattaccagtgtgcaatgtttctattgctgtagaatagattcaaccataaatttagttctgggagtgttggtgactggtttttctgtggtgaagatgttgtcagtgacagccttttcccttttgggaagtaggacaggaagcacaggtcctcctgcggcactagcagtgtgaagatgtttgggtggtgactgcttttggcaatgggaaggggcaaatgtcctgacttcttcacccttgaaggctgtgcacacccatttgcaaagagggttagagatattactggttggtgaagttaggagacgctctgggggattgagggtgagccccatggccgagctcctcagggagggttgtgcctttgaggatgtgtggagcccacagctcagggactatagctatgctggaaagagctggctctcttctaccagggctccgaaggtaggcctggacttcggggccttgccctgttgtttgttctactatttccagcatgttggtagtctgtgcaacagcttcagtccacaaagggctaataccccttgggctgaagaggttaaggaagtctgggggaaggaaacttgaagagaaggaagtctccaactcatatgttaaaggtgaagattagctttgagactgaatcaaagatcagatatcaaatttaggaactgaagatgaagggaaggaaacagagccctggaagtgtattttgtaatcttttgtctccaaccttggcggcagaggggtgggaaaggctgtggcaagggttgggggtgggcagagcctctctggaggtggctcaggcttggtcccttcctagtgatgaggatgagctgaggaaatccctgtctgagctggtggatgacaagtttgggacgggcacaaagaaggtgactcggatcttggatggtggcaatccattcctggatgtcccgcaggctctcaacgctaccacctacaagcatggcgtgctgacccggaagactcatgcggacatggatggcaagaggagtgggtgtcaggctgggggaggggcccgggagggacgatggtgtaggagggacccacccttggccactcctttggggacacacatacaggtggaggtgcagggaatggaagggtgggagttcctgaagcagaaggttgcatccacactccctgtgccccctcctcagcaccccgtgggaggcgtggctggaagaaattctatgcagtgctcaaagggaccatcctgtacctgcagaaggtgagagggaggctgcctcagaacctttatgtagaaagggcccactcagtctcatccagctcctgcccgtgatactcaactcaggttcttctggccaggactgagacctagagaggaactagggctttcttttattaagagtcttacctggactcactcaggaactttgagggtttggggcaagggtctctgaaacgccaaatggattatgctttgtggcattatgggacagactggggtctgaggggagagcatctgcagtaatcgattctatgttaggggaaggtagagagggcatctgtagtgattctatgttgggagagggtattggcaatatggagaagggagggagggaaatgggctgtgtggggtaatgagctatatcccagagtgacatagcatatcccactcaggatgagtacaggcctgacaaggctctgtctgagggggacctgaagaatgccatccgtgtgcaccacgctctggccaccagggcttctgactacagtaagaagtccaacgtgctcaagctgaagacagcagactggagggtgttcctcttccaggcaccgtaagtaggagcagggccctgagttgccgcctggactcccagcctgcagcatcagccctgcaagctctgctctcttggtgtcaggatagaaacctcagcttcctgtgcatgtcagtcacagacttggtgtgtctgcttgtcacagatcagtggatacttcaggtcgtccagagtggtggctttcagtgtggccttctttgccaccttactgcccatgttttaggctcacagagtcagtacctgactgggtctactaagcctgcaagtgcactctgacgtcctgcaggtaggctgatagactgggacgcatccttgacagaggctaagtgggaagaactccttatacctttgacctgtaaggctttttgctttgctgcaacccatcctccgtgactacagatgggggttctcacatgtcagacaaacttcccatgaaggagattaatatgtgtgagaactggggcccagtgggaatctgggcaggtgatggggcagggcagaggatggctcactgtggttgatcctggagctttcgggctctagggacatctgttcaggctggaacaggtttatttcatgggagtccagatgggagttccctatgtagttctgaccaggctcattcacccacctgcccaccccattctcctttctccttcctgtccttgcctagctattagtgccttctctgccagactttgggagaaggcgggaggtcctatcatgagaagtggagacctttatgtcctcttttgtccccaggagcaaggaagagatgttgtcctggatcctgaggatcaacctagtagccgccatcttctcagcaccagccttcccagcagccgtcagctccatgaagaagttttgtcgacccctgctgccctcctgtaccacccgcctctgccaggtacaagatcctggggctaggctactgtcctcagctcagccctttctctggatcatgtagtactgggctgagggacacccgggaaggagagctattctccttcattctaccaccccacccccactcacaggtgctgtgatgggtgacacagctgtgtgggtgtgattgtgggtctgtggcatgaatttcagagactgtatgtgtcatagggacaggttaaacttggctgaccctttttgcagtgctctactggattgtttaaagatttctttgttttgtccgtgtgtgtgtgtgtgtgtgtgtgtgtgtgtgtgtgtgtgtgtgtgtgtgtgcacatgtgtatatatcacattctgcttaaaatgatcttttagttctatcaatgttctagttccatcatttctatttttcaaaatttatgtatatgtgtgtgttttttgtgtaagtttatatgcaccacatatatgcaggtgcccacagaggccagaagagggcatcagattctccagagtaacaggcagttgggagccccctggtatgggtgctgggatccatacggaacctggttcctctgggagagcagtgagtgctcttcactgctgagctatctcttcagcacacacagtttcattcggtatggactaataaaacttcattgtgtatatacactatcttttttgtatcggtttgtctttgctggatactcaggctgattctatcacttggctattgtgaacagtgtttcaagaagcaggtgtgcaggtagggctgtggtatgctgactcggattcttttgtgtgtgttccctgttggagcatgtggtagtttcgttttaaactttatttattattttgtgtgtgtatgatgtgttgggggtgggggacacatggcatatgtggatgtcagaggacaactttgtggagtctgttctctcctctttacgtgggttcagagatctaattcagtcttgttcagcaagcactttatccactgagccatctctgtggcctcctctatctttagtttctttttaatttatttatttttattattgttatttttttaatgtgtattggaattttgtctgcatgggcgtctgtatgagggtgtcagatcacctggaactggaattacaggcagctgtgaactgtcatgtgggtgctgggaattgaactcaggacctctggaagagaagccagtgctcttaactgctgagccatctctccagctccctacttttaattttttgatgagctctcattcatagtaattttcacagtaaatgtgttaattcacagtcccacccacactgtacaaagcttccttcccgctagtcttcataggcacttatttttcactttacttataaaacattttttgagactttgtttttattttttgcgtatgggtgttctgcctgcatgtgcgtttgtgcgctatgcatgtgtctggtgcctgcagaggccagatgagggaaatggagttacagacagctgagagccaccatgtggttgctgggaattgaacccagcccttctgggagagcagtcaaccactgagccaactctccagttccaatttttcattttttagaaacagtccagtgttgatgtttgccttagtcagggttattttattgctgcaatgaagcaccatgaccaaaagcaacccggggaggagagggtttattttactcacagttctatagaacagttcatcgtcaaaagtgagggcaggaactcatgcagggcaggaaccagagccatagcgggatgctgcttactggcttgctctccatggcttgctcagatttttttttttaaatagaacccaggaatggcaccatccacaatgggctcaatccctctaaaattaatcactaattaagacgataccttacagcttgactacaacctgatcttatagaggcttgctcttccttccttccttccttccttccttccttccttccttccttccttccttccttccttccttccttccttccttccttttttcctttctttcttctcttcttcttcctcttcttccttttctttctcctcttctcctcttccttctttttttgagacaggggttctctgtgtagccctggctctgtcctagaactcattctgtagaccaacctgctcatgaactcagagacatccacctgcttttgcctcctgagtgctgcgattgaaggcatgtgccacaagcagactgtggaaacattttcctaattgaggattcctcctcttagatgacttcatcttgaatcaaactgacagaaaattatctgtgacgacattaaaaaaaatctttaactactttagttatattcctatgaaaaccctgtctcactaataccacagattttcagagtattttagacaggaaaggataaacagaggagcagaacttgagagtggaggctggcaagcttcaaacttcctttcagtcatcagttcctttcctatgaaggtctctccacagagcttcagggtgttcacgatctgtgtggagctcctgggagcgtgtgtgtgtgtgtgtgtgtgtgtgtgtgtgtgtgtggcctgtcagtgagaaagtctcatctacctttaggtatgatctggatcacacaaatcagagaatgctggaagtatgtgctatacagagcttgggataagtggcccttatcccagcatgcttcggtgcacatgtgggattctatgcaaggggttgtggtggaggtgtctgttccacagtgtgtatactcacatgcaaatgtaaagctgtttgtttccttggttgagcctgctggctgatgtccctgtgagaaaggggaggaaagaggagagtgggaggagcactcgtgtctagagcctagctctgaacctttaaccttgaggacctgggtcagcctcagtttctctttggtgaagcagcttccggtgtggatggaactgggtccacgcctgttaatacctcaaatgtcagacctcacgacctgggcttgtctctgcaggaggagcagctgcggtctcatgagaataagttgaggcaggtgactgcagagctggctgagcacaggtgtcacccactggagagaggcctcaagtctaaggaagcggaagagtaccgtctgaaggaacactatctcacctttgaggtgggtcttgggagttggacagcagaggtcagaggtggaaatagaggagaaagctggctcccaccctccacttctgccatcaacaccaatgtgccagggactctaatttgagacttgcctacagtggggctctctgaggcaggcgtaagccaagccagtgtcctgtggtcagtctctcacagtctggctgtcaaatgttgattggtttctcctatggctgggtctctccaggagtctttcacatctactctgcagtatgaaaacagagataacaaaagctacaggggatttgcttagggtgaggcctggctttcttttgtgggcggagttcatcttcatgccaggctgttaaagggtttccaaaactatccccatttgacagaaaggtaaactgaagctcagagaagccaaagcactggacaaggtgacacaattaggaaaagtaagacctaggattctaaccaggtgattggctgcaactctggcactggagctctctctcttacttggcttggtgtgggtggggagggcatgaagccctgtagacagaactggtgtgggtggggagggtcccctgatggtggagaaggcctgaatctgctaggtctccctcttaaatgttaacagcaacttttaaataacccttctaagtgtttatgaatgcatccatttctcatgcccttaccaacactgggcatttggaaatgttttaatctttattttatctcacaacttttgaaaaacaatcgtttttccccattttttaatttagatttcacattttttaagggagaagatttagtttttatttatgtgtacctgtgtgcatctttacacttgcttgtgaatgcttcttctacaggccattgtgagctgcttaatatggacggtgagaaccgaactcatgtcctctgcatgagcagcaagcactcttaaccgctcagccaccccttcagccctaaatatttaacattttaattgtggaaacacatgatgagttgtgccatcttgatcgatttttgtttttgtttttgtttttttttttttttttgtttgtttgttttcgagacaggttttctctgtgtagccctggctgtcctggaactcactttgtagatcaggctggcctcgaactcagaaatccacctgcctctgcctcccgagtgctgggattaaaggcgtgcgccatcacagccggctcttgatcgatttttaagtgtgaggctcagcagcatttattgtatccatctccaggcttctccatctccccacatggaagctttgctccttaaacatataatttccttctccttcgaggcacagaagttttaaatatcaatgtagtcccgtttgtccatttttgcttttattgcccatgtctttcatgttgaacctaagaaattgttgatgttatttggattgttaagttgtaagtgagaaactgggcagaaaccagttctcaggaggttgaggcaggaggatcgctgcaagttcaaggttagtctggcttgcatagtgagttccagggctacatagtgagatgatgtctcaagaaaacaatacgtgagattgatgtgtgtgtctgcctatttttggggagggcagtgagattgatgtgtgtgtctgcctattttgggggagggcagtgagattgatgtgtgtgtctgcctattttgggggagggcagtgagattgatgtgtgtgtctgcctattttgggggagggcagtggtggtggtttatttccttttgttgattgcaagagctgttgatgcaggggaatgccacagaggttggtgctttgttactaggtttttaagacgaatctcctatctccattttgttgcatcttgtttgactttgcttttgtcttttgtcttccctttccccagaaaagccgttatgagacctatattcacctcctggccgtgaaaatcaaagtgggctcagatgacctggagcggattgaggcacggctggctactatagaaggggatgacccagctctccggaaaacacactcaagccccgccctcagcctgggccacgggcctgtgactggcagcaaagccacaaaggatacctctgcatctgatacttagctagtgtggctgtgcaggccctagaggcaggcaaatgtccccagaggggtcagtgagcacaattccagccagggattgcttggaccgagctccaggcagttaacaggcaaccagaggggtgtggagagccctgtgcccaaggagatggagatgtcactcatgacgctgatcttcttgcatcctggaccatcgctggcctagaccctctcctagccctgctgccctccagtcatggggccagacatgctctagagctggacaagtctgtcactgttgctctttcccaggctcccttctcatcaggctcctccctcgtcctgtatttgtgagggtgggtctggactctggatttcagcttggctatccaccctttctcctctttcctctcagttgaccagcagcagatctatggaccaccagcaacctttgcaaccggcccagttctcctgcctcacgttgcaataatctggggcctaacctccactcagtgccaagctgattccacacatgcgtgtgtcccctttctcctttcatcccctgaggcctctccagcctcttttttatacagacacacacacacacacacacacacacaatatatatatatgtaaagtactcatttaaagaagggttggaaactactaccgactagagggtgaaaccagaaaaaggaaaactcctgacttggagcctggcctgctatggaggaagcctgcagggggccctgcactgctctgacactggatgggaggatgaagaccctctgtgtttttgccttttccttttccggctgacttgtgactcacaatcacttttccagttgatgcttttggactggacaggatgcctgcgtgtgtgtcacctcctctgtcccaggggtgtcctgtgggttgagtgccttgggggcacacctctgtttgcttttgatcttcctgtgaatactgccaaggtctccgagctccagtgatgccctctgcacagacctcctggcagtaaggaaggacactacctagctgagcgtcatcctccggcaagcccaggctgggcggtagagtagggttaaggaagctgttagtttgtggtctcggggagaaggtagagtgacaaggttttgattagtgataatcctttccttttcctagcaaatcagaaagcctaagctaaggacccagttgagagtcgagacacatgtctctcacgggttggcatcctttgaacaccgcatcacttagagcaacaagtgagtctcggggataggcccccttgacacagctaccacgagccaatcttgcctattgtttggccaacggtttgcagtcttgggtgacataatctttgcaactaagtgcttatcacttcaaatccactcccatctgatgcagggagctgggagtttgtggagaggtgtagtggggttgaaatccaaattgcttaaattggattagctgaagtgcgtttgataaccaaaccatctggcccctttgttttgctcaggggaaacaaatgctcatttgaatgagatcagaaaggcaatttagggggcagcaaagagatctcagttctttgtccagctgcctgaaagtcctttgattttccagccagtgtcccactctctgtgtcatgggtgggggacagtagaggtgaagttctttagcctcagacacgcgtgattccccaagcactagttgtgcctcccatcagtaaagacattttttagttcgcttccttaattgtataattctttatttgtaaattatatacatgtactactgtactaaaatattatgtacattataaaacatacacaaaaatagaaatttaaaaaagatgagatgaaaataaatctaaatcaaagtt

SEQ ID NO: 326 - DNA, 4360 bp, Mus musculus
ctctccacagccgaggctccaacacctgaggggacagaagcgaagcgaacgcggggagctccaacaggcggcggcacgggaccgcgggtccaggggtggcctccgcatggccccaccgtgagaggggacccagcggctgggacacgagcgccctaggggctggcagggacgggtggaaacagtgaccgacatggatgaagagaagctcccatgtgagctgcacaaggaagggagtgctacccaggaggaccacggcctggagcccgaagaggagcctgggctccagaatggaacagcagccagcgaaggcctgagcagccacatcagcggcccaggcggtgagaagaccttagagggtaccatggagcctgtgagaggcccagatgtggccctgcctggccttaacctctctttgaccaatggcctggctttgggacaagatgggaacattttggaagattccatagaatttaagacctggagaagcggaccagcagaggaggaggatgtccctgggagtccctgtccagatgctggggaccctcagctggggctggattgtcctggcgaaccagatgtacgtgatggcttcagtgccacttttgagaagattctggagtcggagctactgcggggcacccagtatagcagcctggactctttagatgtgctgagtctcactgacgagagtgacagctgtgtcagcttcgaggccccccttacacctctcatccagcagagggctcgagatagccccgaggccggggctgggctgggcaatggggacatggggcctgaaggggatctgggggcaactggtggttgtgatggggaactaggcagtcccctgaggcggtccatctctagcagccgctcagagaatgtcttgagccacctgtctctcacctcggtgcccaatgggttccatgaagatgggcctgggggctcgggaggggacgatgaggacgatgaggacacggacaagttgctgaactctgccagtgacaccagccttaaggatggcctgtcggactcggactcggagctgagcagctctgaggggctggagcctggcagcacagatccactggccaacgggtgccagggggtcagcgaagccgctcgcaggctggcccgacggctctaccatcttgaaggtttccagcgctgtgatgtagctcggcagctgggcaagaacaatgagttcagcaggctggttgctggggagtacctcagtttcttcgacttctcaggcctcactttggacagagcactcagaaccttcctgaaggccttcccgctgatgggggagacacaggaacgagaacgagtccttacccacttctctcgccggtactgccagtgtaacccagacgacagcacatcagaagatgggatccacacgctcacctgcgccctgatgctgctcaacacagacctgcatggacacaacattggcaagaagatgtcctgccagcaattcattgccaacttggaccagctgaacgatggccaagactttgccaaagaccttttgaagacactttacaactccatcaagaacgaaaagctggaatgggccattgatgaggatgagctgaggaaatccctgtctgagctggtggatgacaagtttgggacgggcacaaagaaggtgactcggatcttggatggtggcaatccattcctggatgtcccgcaggctctcaacgctaccacctacaagcatggcgtgctgacccggaagactcatgcggacatggatggcaagaggacaccccgtgggaggcgtggctggaagaaattctatgcagtgctcaaagggaccatcctgtacctgcagaaggatgagtacaggcctgacaaggctctgtctgagggggacctgaagaatgccatccgtgtgcaccacgctctggccaccagggcttctgactacagtaagaagtccaacgtgctcaagctgaagacagcagactggagggtgttcctcttccaggcaccgagcaaggaagagatgttgtcctggatcctgaggatcaacctagtagccgccatcttctcagcaccagccttcccagcagccgtcagctccatgaagaagttttgtcgacccctgctgccctcctgtaccacccgcctctgccaggaggagcagctgcggtctcatgagaataagttgaggcaggtgactgcagagctggctgagcacaggtgtcacccactggagagaggcctcaagtctaaggaagcggaagagtaccgtctgaaggaacactatctcacctttgagaaaagccgttatgagacctatattcacctcctggccgtgaaaatcaaagtgggctcagatgacctggagcggattgaggcacggctggctactatagaaggggatgacccagctctccggaaaacacactcaagccccgccctcagcctgggccacgggcctgtgactggcagcaaagccacaaaggatacctctgcatctgatacttagctagtgtggctgtgcaggccctagaggcaggcaaatgtccccagaggggtcagtgagcacaattccagccagggattgcttggaccgagctccaggcagttaacaggcaaccagaggggtgtggagagccctgtgcccaaggagatggagatgtcactcatgacgctgatcttcttgcatcctggaccatcgctggcctagaccctctcctagccctgctgccctccagtcatggggccagacatgctctagagctggacaagtctgtcactgttgctctttcccaggctcccttctcatcaggctcctccctcgtcctgtatttgtgagggtgggtctggactctggatttcagcttggctatccaccctttctcctctttcctctcagttgaccagcagcagatctatggaccaccagcaacctttgcaaccggcccagttctcctgcctcacgttgcaataatctggggcctaacctccactcagtgccaagctgattccacacatgcgtgtgtcccctttctcctttcatcccctgaggcctctccagcctcttttttatacagacacacacacacacacacacacacacaatatatatatatgtaaagtactcatttaaagaagggttggaaactactaccgactagagggtgaaaccagaaaaaggaaaactcctgacttggagcctggcctgctatggaggaagcctgcagggggccctgcactgctctgacactggatgggaggatgaagaccctctgtgtttttgccttttccttttccggctgacttgtgactcacaatcacttttccagttgatgcttttggactggacaggatgcctgcgtgtgtgtcacctcctctgtcccaggggtgtcctgtgggttgagtgccttgggggcacacctctgtttgcttttgatcttcctgtgaatactgccaaggtctccgagctccagtgatgccctctgcacagacctcctggcagtaaggaaggacactacctagctgagcgtcatcctccggcaagcccaggctgggcggtagagtagggttaaggaagctgttagtttgtggtctcggggagaaggtagagtgacaaggttttgattagtgataatcctttccttttcctagcaaatcagaaagcctaagctaaggacccagttgagagtcgagacacatgtctctcacgggttggcatcctttgaacaccgcatcacttagagcaacaagtgagtctcggggataggcccccttgacacagctaccacgagccaatcttgcctattgtttggccaacggtttgcagtcttgggtgacataatctttgcaactaagtgcttatcacttcaaatccactcccatctgatgcagggagctgggagtttgtggagaggtgtagtggggttgaaatccaaattgcttaaattggattagctgaagtgcgtttgataaccaaaccatctggcccctttgttttgctcaggggaaacaaatgctcatttgaatgagatcagaaaggcaatttagggggcagcaaagagatctcagttctttgtccagctgcctgaaagtcctttgattttccagccagtgtcccactctctgtgtcatgggtgggggacagtagaggtgaagttctttagcctcagacacgcgtgattccccaagcactagttgtgcctcccatcagtaaagacattttttagttcgcttccttaattgtataattctttatttgtaaattatatacatgtactactgtactaaaatattatgtacattataaaacatacacaaaaatagaaatttaaaaaagatgagatgaaaataaatctaaatcaaagtt

SEQ ID NO: 327 - protein, 758 aa, Mus musculus
MDEEKLPCELHKEGSATQEDHGLEPEEEPGLQNGTAASEGLSSHGPGGEKTLEGTMEPVRGPDVPQLSLTNGLALGQDGNIDSIEFKTWRSGPAEEEDVPGSPCPDAGDPQLGLDCPGEPDVRDGFSATFEKISELLRGTQYSSLDSLDVLSLTDESDSCVSFEAPLTPLIQQRARDSPEAGAGLGNGDMGPEGDLGATGGCDGELGSPLRRSISSSRSENVLSHLSLTSVPNGFHEDGPGGSGGDDEDDEDTDKLLNSASDTSLKDGLSDSDSELSSSEGLEPGSTDPLANGCQGVSEAARRLARRLYHLEGFQRCDVARQLGKNNEFSRLVAGEYLSFFDFSGLTLDRALRTFLKAFPLMGETQERERVLTHFSRRYCQCNPDDSTSEDGIHTLTCALMLLNTDLHGHNIGKKMSCQQFIANLDQLNDGQDFAKDLLKTLYNSIKNEKLEWAIDEDELRKSLSELVDDKFGTGTKKVTRILDGGNPFLDVPQALNATTYKHGVLTRKTHADMDGKRTPRGRRGWKKFYAVLKGTILYLQKDEYRPDKALSEGDLKNAIRVHHATRASDYSKKSNVLKLKTADWRVFLFQAPSKEEMLSWILRINLVAAIFSAPAFPAAVSSMKKFCRPLLPSCTTRLCQEEQLRSHENKLRQVTAELAEHRCHPLERGLKSKEAEEYRLKEHYLTFEKSRYETYIHLLAVKIKVGSDDLERIEARLATIEGDDPALRKTHSSPALSLGHGPVTGSKATKDTSASDT

SEQ ID NO: 328 - DNA, 69028 bp, Homo sapiens
  misc_feature (1)...(69028): n = A,T,C or G
cctataatcccagcactctggaaggctgaggcgggaagatcgcttgaggtcagaagtttgagaccagcctgggcaatgcagggagaccttgtctctacaaaaaatttaaaaattagccaggagtggtggcatacacccgcggtcccagctacttgagaggctgaggcaggaggatcccttgaacccaggagtttgaggttacagtgagctgtgatcacaccactgcactgtagcctgggtgacagagtgagaccctgtctcaaaataaataaatagcctgggcgctgtggctcacacctgtcgtcccagctcttttggaggctgaggcaggaggatctcttgagcccaggagtttgagatcggcctgagcaacatagtgaaaccctgtctctacaaaaaattcaaaaattagccaggtgtggtggcgggtgcctgtagttccagctacacaggaggcagagaggtggggggatcacctgagcccaggaggttgagaccggagcgaacaaagatcgctgccactgcactccagcctgggggacagagcaagaccctgcttcgctttattaaaaataaataaatagataaataaatacatttttaaaatgagttagggtcaagaaaaggtggctttctggtatgcccaggtgtcatggacattagagctgtttgctgtgcagcagctgtccccattctcctgaaacattcccccattttcctttgggacaaatccccacccaccatcagtcagtccatgtggtggatcacctgcggctgactccaggcttcacttcaaaggggcagtgactcttggtgactcagtgattggttcagggctgggagcatttcacatttcaccatgttgcccaggctgggccgatgagactgagtcctgagacttctgcttgtactgcactgttggaatggggacggcttcttccctcaaagctggacgtaagctcagacctgccttagccaacttgacgcgtttttggaagagcctgcctggaaatgaaggcagtgcagaagagcactgggctacagatgtggagaaagatcacatttgaaagcctcttctgtactgcctgacctactcctaaacttgactttccatttagagaaaccccttttcactgatcagtttgagttgggattctgtcactcgcacaaccacttacagtacacctccacgagcatccgaaccggggagtgaggagggacgggttggggcctggggggtgtgtgggatgtgtggccccagtggtcttcccaagtgagagaggctgagcacatggagggcactcacttagcagtgctagatggaggtggcatgaaaacagattgccttggccttgtcctagaagcgctctcaagctgtcagcggagaaggtcatgggcatgaacggggcaaacaagaccaagggctcctaccatgcctgagctgcaggctaagctgagatggattctgcccctccactccacccccacgccccagtgcaacagaaagcccagttccagcacagacgaaggggggcctgggctctgccacttactaggggtgctctggggtaagtcactgaactttctgagctcgtgtcctcataggtaaaatggcaatcatgtccacttcataggagtgctgtaagggtgaaatgaggtcatgcgtggcaagaactcagcatgagcctggctcacagaacactctcagcagcagtcagctgccacaaccagcgtttgttggtgttctctcccagctaaggagtccgcctggtgccgcgggtgcagtttccaaaaacaccagcaggtggcgccccgaccccaaaagagcccccgtcgctggccttcccagggccgggaggggctgggctgggcggcctgttgaatctcggccagttagacccgcgatctttcccgctgcacggggacccgtgcgtgaactcctctcaattctctgtggtctctggcacaaggaagagggggtctgggtcaccatgggatagttggggagcctgttttccatccgtgttgtgtaacggcacggccttcggagacagcctgggcaaagttgaggaaatacccgggttggagcggataggagactttgagaacgggcgggatcccgacgcgcaggctgatttttgagtgcctgcggctgaactcggggcgccgctgggcctggtgctgcggtaggaggatgacccatatgacctgtattcgcttcctttcagagtgcgggcgagcggggctgcgcttcgcggaagactccgggcagtgctgggcactgggacgcggggagtctggaaattctgcgtctggccagcagagggaggcggagagcccgccccccccgcgccccccccgaacccgtgcccaggcctggcccggctcccccagcccgagctccccctgcgggaaccttcccggcttggccgctcctccctgggcaggactcgacatgtcccgtgtcccttcattttggaaaaagtcttgccctcctctccccgcccagcttcttggaggagcgcgtgggttaaggggagggtcagtttcaacccgaactcaaccctaaccgcgccgcgcgccccgctccctgggcctcagtgcgggtgatggcacggactggccactctaattctagcagctgcgaattcctgggacagggtggggtgacctccactagggtagagactggggggggcacaaggggcttctccccctaacccccatcaacccaggcctggacggccagctggacctccggaagcgcgggctgcccaccccataccaccccggccagttcccgggactctcctggacaggctcccggaggcccacaaaggcccttagatgccgttctgggccaggctctgccggggccctgggccggcggccggctgccggctggctctcggcactgcaagtccctggcactcctgtggggctttgtccaccagccctggccccatgctggccgggcctcgtcgctgggggagggattgcacaggcaggtcgtagagcttgggcagtctccctttctccagcccgtggccttgctctcctccaggtgactggccccttacctcagccttgctggcccccacagccagggctgtccagtgagcaaagagtgtgagtcctccccacgctccctcctggctaacatgggagtggtgggtcacgttgtcctcgtttgcagaccagaccgggggctccagggatcttccccaggcctccgtggctccctgccccggctcctgactgcacggtttccctactgtgggcctgtcagggttgcggcccaggcatgcgtttgtccctggccactcactctttcattcattcttcggttcatcactctttggataccaacttcatccaggccctgggctcagggaggagctggggactgagagggagtgtgcagggtccttgcgctcatggagtgtccagtccagacagtcacgacacagtatgacatgtgctgtgatagaggcagacctgcccggcctgggggcacctcctcagagaggccttcgctgaacacctgactgaagtagccctacccaccagccagctgcagtcacacaccaggttttgtttgtttgtgtgtttcgaagcccttctaatatttacagctgacttcttcctttattaaggaaggatcgctagagcctgggaggtcaaggctgtagtgagccgagatcatgcccctgcattccagcctgggtattcctgtctctaaaagaaaaacaaaaaacaaaacaaaacaaaaacaaaaagaaactcactcaacaaactaggaatagtgggcactcattatatgagtgcttcagtaaatgcccactgggtgccaggcactgttccagccccctgggaatctacaagggagagaggaaaattcttaccctcatggagcctatggcctagtgatggcagcggtggtggggacacagaccattcccagaaaggacaagcatatggtatatacatatgtgttatggaggaaaagaaggcggggaaatgggagatgtggatgaaggagggggtagaattttagtagagtggtcagaaaaggtgacattggaagagagcgctgaaggaagtgaggggtgggcggtgcggatacctgggggaggagtgttttaggcagagagcagcacggggccgggcgggcgctgaggtgggagtgtccctggtgctttggaggaacagggaggggaccggtgtgtctgcaggagaatgaggtcagaggagtggtgggggccagatcttatgggattttgtggcctgcgtaaagacttggtttgagtctgggcacgggagctcgcgcctgtaataccagcactttgggaggctgtggcaggaggatcacttgagcccaggaattcgagaccaggctggccttgtggtcgtgatgtttacggcaaagaggaagaggaggtcagtgtgggttgggttaagatggaactgctctttggatatcctagtggcaacttcaggtcagcacttgggtgttggggtctgacctcaggtggaaaggtccaggttggagaatcacacaccgagaagcttcagggtttagctgggctttgaagctgggctggggtcatcatgggaaagagtgagatggagaagaccgaggactgagccctgggagctctggcattggaggtcagagaggggcggagaaactagcaaaggaagatgagaaggtgcagccagagaggcaggaggaaaaacatgacagtgaggagtcctggaagtcaagggaagaaagtatgtcaaggaggaagcggggatgaacggtgtcagatgctgtcaggaagctaagaccaggcctgtgaatggacttttggatttagcattgtggcagtcactgaggactaggccacagtctagcaccatgtacaaactttagaaaatggtggccatggccgggtgctgtggttcatgcttgtaatcccagctctttgggaggctgaggtgggtgtcctgaggtcagttgttcaagaccagcctggccaacatgatgaaaccctgtctctactaaaaatacaaaaaattagctgggtgtggtggttgggtgggggggagcgcctataatcccagctactcgggagaccgaagcaggaaaatcgcttgaacccaggaggtggggggtgcagtgaaccgagattgcaccattgcactacagcctgggcaacaaaagtgaaacttcatctcaaaaaaataaaaaaagaaaagaaaatggtggccattccaggtggacctggctacacaggcaaacagaaggtggataccttgctgtaaagaaaaaggcactctgcacagtggctcacacctgtaatcctagcactttgggaagccaaggcaggaggatcacttgagcccaggaagtcaagaccagcctgggcaacatggcgaaactccatctctacaaaaaatataaaaattagctgggtatagtggtgcatgcctgtagtcctagctactggggaggctgagatgggaggatcgcttgagcctgggaagtcaaggctgcactgatctgagatcatgccactgcactccagcctgggtattcctgtctctaaaagaaaaacaaaaaacaaaacaaaacaaaaccaaaaacaaaaagaaacccactcaacaaactaggaatagaagggaatgaactcaacatgataaagggcatttatgaaaaacccacagctaacactgtactcaggttgcagcgagccatgattgtgccactgcactatgctggcctgagaccctctctcagaaaacaaaaaacaaaaaacaaaaaaaaaagagaaagaaaaaggcatctcttcccctgacagatacaaccttgcatcaggacacacagcatggtgaaaggagaacaggttgggttttagctacctctccatccttcatgtaacccagcacccttgtgcagtgcccagcctgcacatctgtactcagcaactgtgttggtgactttgatgagtggtgtcagtggactgtacagggagataagagctagactggagttcctttgagagacaggaattagagacagccagcatggacaactttttcaaggagctttgctgtaataggtaaagagaaatgggatggtagctggggagtggagaggaattagccaaatgagagtgcgtgaaggggaaggcatcccaggcagagagcctgcctaagcaaagggaggtcactagaaatggttgagggggaatgagtgtgggaggggtcctaggacatcaaatttgaggtgggaagtgtcaggagaggggacatagaataggtgaattggggccttcatcttggggtcgtgggggtgctggggacaggggcaggttacaacaaagctgtgaacacagtaggtgcttattgagctctctgggattggcctggggaatccctacccaggcaccccacctgggcctcaggcttccagctggaagatgggagaattgggtgttttaggggtcctctgagtcaagcctcttctgggttggacccaaatgagtcctcccaattggtgggtccctctgtccctgcccaaggtgctgaccatgcccaatgcagctggccccccctccccccataactttcatgctctcctggggaccagtcaagggccaggcggtaaaccatgggaaaaggcccctccatgtgcaagggtctttggttcagccttggcacctgcttcttatgagaccccctcaggtgaggaggcggggtgggggaggaaagggaggtcacttggaggaacagggagaagctgcgcattcttctttcccttgaggaatgggggaaatatcgtctattctggctcctgggtagggggatgttgaccctgctgtctttctttctctttctttcttttcttttctttctctctttcttttttctttctttctttctctttctcccttccttccttcctccctccctccctctctttctctctctcttttccttccttcccttccttccttcctttctttctttttttctttctgtctttccttccttccttccttccttccttccttccttccttccttccttccttccttccttctttctttcttttttctttctttctttctgtctttctttcttctttccttcttcttttgactgagtcttgctctgttgcccaggctggaatgtagtggcacgatcttggctcactgcaacctctgcatcctgggttccagtgattctcttgcctccggagtagctgggattacaggtgtgcatcaccacacccggctaatttttgtatttttagtagagaggggggtttcactgtgttggccaggctggtctcgagctcttgacctcaagtgatccaacccactttggcctcccaaagtgttgggattacaggcgtgagccaccattcccagcctgaccctgctgtctttcaggaggcgaaggtagccacaaggaacagtaacaatactcccctctccagtgtccatggcacccagaacactcacacagagctcacctgtggcctccaggcagccctctgagccctagggagctagttccacttgacggaggggaaaggaaggttcaggaaagggtacagctgcccatagccacacagctaggaagtgtgggttggggggactggactagaacccgggtctccttgcccctgccacaggctcccagagctacaaaggacagggggcagatccagggggcagagactaggttctgtgtgccagcccagcgcaagttagctggagagacagctatgtctacctttcccctttccctgttctttccttccacataatttattaagccatgctgagtgttaggtgctgaggatacactgtgaaccctttcaaggggctcagagtccatccagtggacaacaattaaatagtgcattccatgagtaagtaatcattacagctggaacagccatggcccattgagtgcatctgtgtgccaggtcttgagcacatcagctctttcggtccccatcctagcctcacaaagagggggactgctaccatcctcattgggcagatgaggaagtaggagcccagaaaggtggtccagctgtgacttgagggcatgggtgccaagggtggggaatgtggtatctaagccctgccatgagcacttccctccacagcccctgctggtcgccacccttctctgcctacaggtagcagagggcaggggggtagaatgcaggacagcagggaagccaagctccctctgtgccctttaagatcctgggcacctgcacagagagtggctcccttgtttctgggctctgcggtaatgtcctagggtttgatgggcagtgaaggatgtggtctgagtgccctcttaattgaccagctgtgctcacagattcagatctcctgggatcatgagcaagtgacttatgctctccaagtctcagttttctcatctgtaaaacgggttgtaggattgttttgagaattaaatatgacacatgaagagcacttggtagatgcttggttgtcagaggtgtcaccatggttgatgaagtcccagctcctgctgttgcccagcttgaagggagggagactacgcacagctcagattccacacctccaattactgccaccctaagaggtcagcaaatcctcttcctgctccctaagaagagtccatgtttgtgtgttcatgggtggaaagaaggtcagagaagacttcatgaaggaaggggcatttaaggaggaatttgagggttcagtaggagttcactgagcacagcaggatcaaggccccaccgggcagagtgtggatcatctgctgaggtctggagatggaagcaactgggtgtggtgaaccccccaggggctggagtaggggagaggggtagaaagtggcctccagtggcagggcctgactctatcctgatttcccttctcccaggcactgggcctgctccccacgccctccttagatccctgtgggtgggggccctttaatgcctctctgagaggcggactcttactctgcaggtgcctcacagccaggaagttcttaatgtctagcccaggtacagccagtcaaccctcttcttcagttagagtcctgggctgaggggggcggcttcagggccttgacttgcccttggggagacaccgtgggacaggtgccttgggagatggtttcctctgcccagggcaccctctgtctctctctgtctccttatatctgcccagggaggcttccccttgacctggcacagggatgtggattcttggttggacccacccctcacctcccgcctccctcaggttctttctcctttgtctctttctcctctctcctgcctcctcccatcccactctgtcccgaggctccttctcaccccacagcccaggtctccgtcccgtcccgtgtgactctaggtctcaggggctcagtctccctctctgagattcttcaccttggccccccgcactccctgctcctcccttggcggcgtctcccgggggctggcgtgtgtgtcggggggctgggggcaggggtcactccctgaacagaccgcgggaggagggccaggacccgccccctccttcacctccagggcctggcgggtcccgagagctcaggttctagaccggtgggtcctgcctggagggcggaggtggttgggtctgcccgagggttcgaggacggcaggggcccagcgtggctaggagggggcagaaccccgggcgctcccctccccccctttcttaaagggcccgcgcggggcagagggggacaaggtgggccgcgctctccccggcacgctcggggtcccggggcgagcgctgcgctgcaagcggacagggctgggggccgcgcttccctccgggctccgcgcccgccgctcgcgcgcccgcagtgcccccgcccttccccgcccttcccgctcctccctcctcctcctcctccagctcacggctccgctccctccctcctgccgtccgtccccctcgctcagcctctccacatcgcggctccggcacctgaagggacgcgggcgggcgcgggcagctccgaccggcggcggcggggcgggacaggcagcccggcggcctccgatggccccgccgtgagaggccggacccgcggcggggaccagcagcggtgagtggggccgcggggctccgggacccgccctccccgctggcggccaggccggggcgggacgggccggggagaggccggtgcgggtggggggcgtcgccctcgccctcggtgcccacccgggtccgctaacaaagctacatttccagatcaattccgcggcgtctggagcatccgaaggatacggttgtcatggagatggggccgagagaggaagcccgggctggccgggtctgggccggggagagggggcgccgcgggaaagcccgagcccagcctgagggacggtgggggctgccgggccgattgtctcccggctccgccacccactaccctctccccgcttttgtataatctgggggtacgcgtgtgcgtggggggtgccagtggcagcctggtggtcggggatcggggcattgggtaccggggcctgccggcagccaccttcacgaggctgcagctttgaggatttatttctgtttccagtttcccaactttgacagccctgcttggcggccaggcctccccggctctgcagctagagcgggggctcgcacgggggcgtggcagtcagggctgaggaggcacataatggccgaggcggcagcgggagggaggggtcccaggagcgggctgctggggctgggtgcagagggagtccagactggggacaaccctgcccagcgggccccctcggaggaggaggtattcagctgttcctagaggatgcagggactccccggaatgatcactgggggcattgtttttgcataggcccagggggccactgtctcaagcccacccctttgtcttggggccatcttgggggggccaggaagagaacagggagcagaagcagcagtcacaatggaagagggcctaagactcctggcagcctggggataagccaggctgaatttgatggggatcagcgagagggctcaggatttggccagggcaggtgggcagcctgggtttggactttcctgggttccccagttcctttttctagatcctacaaacaagagctgcttaatagtggttgggggtgggggggttcactgggctgggactgcctccaaacccaacccgtggcccagggcagttgcagtcgttctttcattcttccaccctctccccaggactttaggaacctgtctcccagggaagctacaagttctggggcctgggatctccgaatcagtaaaatgtgcctgctgtcctcccagcagcccctttccccaatatatgcgggaagcagggaacaggggcttttgagtggggctactgcaaagtttggtcctggtggaaacatagcaggtccctagggtttggccagagcccccaaaagattcccacgcagtggggtgagtaggtgggtgtggcccagctaaaggaggatgactgggttgtccttggaaggcctccctcactggtgcctcttgcaaggttgaagtctcaatgcttgggtgaattgcaccctgcagcccagggatgcccccagaggcctccccgctgcagcttgtcctggtctgacaactatggggtgcacgctccacaagcagacctgacaaatagtgcctcccagggtcttccctgaagggagagagcaaagatagctggaaggaatgacttcctgctctagacaggactgagagagagagtgtggctggggggtattacctcacctagcttccacatatggagcatatgtgctaagtaccctcataacagtctttagagggaggcactacccttattcccattttgtggtagagctgtttgttcaaagtctcctggttagtaagtggcagagtgaggatttgcacttggccagaactgtctgatactcagacctgtgtccccatcctctcctcttcttccctggagacacaatttaggagagaggtgggaggtgggatagagtgtctctccatctgggcaagagggtgaccttgggaaaaacaagcactaagctgtagtttcctagggaggtgggatcaaggcattcccattccggacgttggcttgcaggagatcaacactgcctctcacaacagacgatgctctagacctcctttgccagatggtcttttccaggaaaatctgttttgagcggcatcttatgtctgaggctccgtatttagactggctctccaaacaggaggatacacttaggctgtcgccccttgaggggtgtttgggggagttgggtgggcttggggccagacctggctccttgccacagctcaatggagggggaggggcccatgttcctgccctggtctccctgggaccagcttgttttccttgtccctctaagccggcttgcccacaggtgagtccgtttcctcagggtctggcccccttttcaggtggtaagccactccagcgctgtgcctgcctggcctgggctggcctgtgggctggcccacagctctgcatgctcaggtttgtggactgccctggggaaggaatgtcctctcctctgactcctgccccaaaattccaacccctgagctcccctctttggaacgtctccctccactcccttccttctcccaccttactttttatcttgtcaaagctgatagtatagtgaacacccacctacatacccttcacctagagacctagatttgccagttgttaacattttgccacatttgtttctctctctctctctttctctctctctctcaatcttttgaaagtaagttgccaacattataacacttcacctctaaatacttcagcatgaatttcctgagacagggacatttttctacaaaaataatgcattgttatcatacccaagaagtttagtaatcatccagtttaacctaacatgtagtccatatttaaatttctctagttgtctcagtaaagtcctttatagctgttttttttaatttgatcatggaacatacattgcatttagttattatggctctttagtgtttcaatctggatgaatccctggcttttttgagattttttttaatgacattgtcaatttggaaggcttgtgatacgtctcacatcctggatttgtcttcttgcttgcttgtgattagagtcaagttaaccattttggggcaagaatatctcatagatgatgtcatgtccttctcagtgcatgatattggcaggcacctgttattagtttgtcctgtagtaggtggtggtaagttaggtcacttggctcaggggtccctgtatttcaattctgttcctcccccttccctacctccagaagcttcatctacctggtaatctgcgcaccaggtcagcaaatctgactgaacccctacatcagaccagatgctggagaatagagaagcagacagaaactttcagggagctcaaaacttcagggttgggagtgggggagccacaactcagacaggtgctgttggtgggggagaggggaagcccagagaaagtagtgagaggcacagcaaggggagagggcatgggggccagacaggaagggaggcccaggccacagctagcctggaatgtgggctgaggggttggccttttccccaagggcacttcaaaaccactgaagggttttgaagaggggatgatgaggcagtttggagtgttggaaaggcactctgaggaggatggagtggggctgactgggccagcacatgggaaagagaccagccaggaggctgtggcagcacccagcacaagacaggggggacagcattggggctgctgcttgtggcatatagagagagtggagttgtgtggtttgggggccctgctgggagggtgttgctggggggtatcggagaaggggatggagctgggagagatttaggaagcagaacggacaggcccttgtgtctgactagagatagggagagtgggaaggatgagcttgtgcaatggcttgggaagggagatggaggttttgagtgtatgaggtctgaggtgttttccaggccagaggaatggtgtgtgggaagctcatttggtggccccaactgtggcccccttgcagaagctcattttgagatgcaggcagaaagaagagccacacatagcccactgcaggggatggatggtgggcttcaggcaccagcaggggagggccctgagcagggctaggccagctcagatggcagctgcccctgtggaagccaggataatcctgccactaacttgcagaccccaattcccttacctcattttgcttcttcacactttcttggcaaaaccccaaccctggttaaatccaatgcctggcctaccccactcctgcacatgcagctgaatggggctgagcaaaacaactgccctgactgttctcactttcagtccaagcccatgaactctgaacttcaggtgggtccttagtgcagtccaccaggcacagcacaggttctgaagttgtcgcctctcccacatgctagatgattctttcacacttgctctttgtgtgtgtgtgtagagatggggtctcactatgttgccagagctggtcttgaactcctgacctcaagtgatccgccctcctcggctgccctccttggcttcccaaagtgctgggattatgggcataagcccctgtgcccggccctcacttgctcttctaccctcaccctccggcctctcccacccttcctttcagcggataatctttgagaaaatataagcagtcagagcgtcctgaggctcccagtgccacactcactgtctgccagcgtctgcactcactgctctgctttcttctgtatctgtgggtgaagtgttcctgctcctggttaaggccacccctccacttttgcagagatcctggcctcttgtgtctgcttgagaacatcactccagcagggcccccgcctgcatcattgggtccccctctctgctagagcatcccatgaacagatatcttgctgttatttcttttatcttaaaaatggttctggctgggcacggcggctcacacctgaaatcccatcactttgggaggctgagataggtggatcacctgaggtcaggagttcaagaccagcctggccaacatgacgaaattccgtctctactaaaaatacaaaaattaaccaggcatggtggtgggcacttgtactcccaggtactcgggaggctgaggcaggagaattgcttgaacctaggaggcagaggttgcagtgagctgagattgcgccactgcactccagcctggatgacagagagagactccatctcaaaaaaaaaaaaaaagatctctccttcccttagcagagaaacttctggaagggttgtctagactcattgtctccacatcctctcctcctgctctctcttgactctactcttatggggctccactccgctgacctctcctctcaaggtcatcagtaatgttcctgtcgctgcacccagtggtcaattctcagtcttattggcagcatttgacacatccagtcttcctcttccttgaaataccttccttggcttccaggacacccattcttctgttttcctcctaccttgtgggttgctccttctcagcctcctttgctggttcctcttctccccctcccacctcttgatatcagggtgccccagcacttgccctgcacaggctctctcccccatctccactcctccatacagatcccatccagtcttgtggctttaagtatcacctatgtactgccagcccccaaatttaaatcccaagtctcaacctctcacccgactccagtagcctacacagcatctcaactttcatctcaactttcctgtctgtcagacaacccccctcaacttgccctgatcttcctccccaaacctgctccacccagtttctcttcttgagcggcaactccatccttctagttgttcagggcacaaatgttggcgtcactcttgggtcccctctctctctcctgccccatgtacagcacatggatgggtgggtgaggctttagagtgcctgacttcccttcagcgggccatgggcaagagaggaggtgacagtgaaatggcccagcacagcccctttcacacctgcttacttcgtaccacatgctgttgtattttcatcaaggaggccacaacctgcagaccctgagccgaagtcctaaagaggagacaagactggacagggaagaggagggagaggaagggaggactcgcctggggagagatgaagagacgctacataacacagagattggggagggggtggggaggaaggccacagttggggaggcagagaaggagaggagttggggggcctggacagagaatgtgaggacttagagggtttggggtgtgtgaaaactgggcagacagaagggaggaggaagcttcttggtttctgtctcttggctgttgaagcagactgtggggagctactcagaggtggagctctctcaggtctgcctctgcccaggtgttgtatccgaggctgggctggttgggaggatttgcacttggtcagtccattgtagctctcaggattcaactctcaacccacaggctcatgttagcctgtgggctccatgagcctgtgggttgaagcagtgtgagtccagtgccctccgaagttggaggaaggtggcccagtggtcagtctggctgtgaactctcttgaccaagacagcttagtcctttgtggttcctgataactgagggttcaccccgtagggaagtcagttgggcatagagtcaccagctgtaaacatgatttgaaatttgacagcagactttgtggatttcattagtgttaagggctcttcaaccagcatgcagatgtacgcaaatgctaagcaaatgagggtgccaattggctggggggttggggagagaagcaagctgggagatgtctaggaatgacctttgtggagcaagctccaagggcccctgagaatcccagcagagcacatgcaggataagatgcaaatgtgcatgcagccccggggacttctgcctgcctgaccatgagaacatgagcccaaggcaagggctggttccctgatggccacactgagagaaggaaagcaggtgggggctggttatcactccaaacaggcattacctgaaagggatgggcatctttaaagagggcgtaggttcttggcccttgccctacacttgtgtgccctgagatggaaagataggagtgagcctggccttgggtgagggtgttgggagggcaggacagtagggacctcagctgccttgggaaagggaggggatgccctctctggcccccctcctggccccacgggagtctttgatttgcctctaccctctagctgggcttctgaagcccctgcctcagaacttgctctgacagctgccaaggacgcatatccaatgggtgctggctgagtggcctgtgctgtgtgctgctgtcctgggcatggcacccctgggggtagccagcttggttccttgcagcccccagaaggttttgggaggcagcagccctcccttgagcactgaacacatgccatctcctttagtcctcacaggtgccttgagaagacaaatgctcttggcaccccccatttatggaggaggacaccgagctcagatagacaggcagttttcctgaagtcacacagcttgtggctagcagagcttggatttggagccaggtctttctgagcacacaggaaagggcactgacccactctcccggactgtcccagtctgaggcccttgcagcacaaggcggtccaagctgggaagaccaagtgggttaagagggtttagggtcactttgggatgtggaatccgggaagttccctaggctcctgggtgggcgtcccttccaaattatcctgggcatctccctgggcagttgggatgtggaggaggctggcctgggcttagggagggggcctggagctcttggaggtgggaagatccttaactccaggccccttggttggcagaggctacaagggagcatggttaggggggcccaactgagggcttcctggcagcaccctactgcccatgctgccagtggcctagcaggtcctgtggagccctggagcactccaggcctggccatcctaggccccattgcggtgtgggcatcgctgttcagggtctgttttgacactccctacatgccacatgtttgcattgatcatctcttttaagtgtctgtgtgtgtcttgtgtgttcatgtgtgttcacatgtgtttgtgtgtctgaagatcctagcccatgtgctaaaatctgggtgatctagggaatcttgggttgggattttggggaagagtagtgaaccagtgggggtgttcagggtgggtttccagggggcagagaataggtccaagaaagatttctttgccaagtaaccctcatggagctctctccaagtatccaatgttggttggcaggtccttggagactgtccagattagggtatggaatcaaggatggatagagggctttgagcctttccagatatactctaaatgttgcacacatttgtgagatttccagggcaggatcttccatcaagtgcacaaagaggtccaggacttggaactggttaggtatcaatggtgcacgtggggacatgaggtcagagaggggtttttttgtgcccaacttcccctagcccactggaagcaaaacgtgagggtcctggtgctcctagatttgcttccctgggtcagctgtggtctcagccttgccaccacactgacattccagaacaattttctctgatcccagtcccttctgcatacccaggatggttttgaccctggatgcccgatgatgtagatctcgctgcccttaaccttgcccataggcctgccagtgccttgtccaccttaccaggcaaattagggggattgcctcatgagcggctgcccagttccctctgtgtgtgtgcgtgtgtgtgtgtctgtgtgcatgtgtgtgtgcgtgcgtgtgtgcatgtctgtgaacgtgtgtgtgcatgtgtctgcacgtgtgcgtgtgtatgtgtgcgtgtgtgcgtgcgtgtgtgcatgtgtgtgtctctgtgtgtgtgtgagtgtgtgcgtgtgtgtgtattgtgcatgtgtgtgcgcatgtgtgtgtgcacgtgcgcgtgtgtctgggcatgtgtacatgtgtgcatgtgcctacccatacctgtattgtatgtctgctgtcaggtcctgcacccatgcacttgcccctgtgtcttatagagcatgctggcctctggagccctccctggtgggccccacctccagccctgcccttgggtttcccacagtccctggcttggatcccaccataaaagggaccgtaagattatttctttgacaatctagcattccatcagaatctcagccttgctgctttccagctttgtgactccgagcagttcctcaatctctcttagcctctgccacaaataggcatgatgataatccctgttattcatctaacaaatacttctaaaggcctgctgtgtgccaagcattgcactggactctggggacacagccgtgaacatgacatagtccccaccctcactgaacttacatcctagtacagagataggcagggaatcagtaaacacatagaaaagggagcttcagttctactgagtgctatggtgctccatcactccatgatgcagtgccaggggtcagagagggcctttctcaggaggcagtgttggagttgagccctgagtggcagaagaagctcttttaaagatctagggaaagagcattctaggccacgggtatagctggtgcaaaggccctgaggtgggaatgaactcagggagcggaaagaaggccactgtggctgatgtgggagagcatggggacatggggtagagggcagcagaaccagctcctgcaggaccttttcaggccatgctggggagactggattctaatctaggggagatggttagaggattatgaggagggaggaaggattgtgtttttgcaactccctccagctgccacagggagagtgaggagggggacagagttgctcaggagagctgagacccaggaagtgcttgactctgcactcagccctggcagttggctgagccagggttccactatcattataggacctaccttagctggtgttgaaaagaggctgccgagcccaaggtcattccaagggctgaggctagtgggagaccctgcctggagaggggcttggatcaggccaagagaggctgcaggggatcttggccaatgccagcctgtcatttgcaggcgtctccttgggatgggtgcccagtggcccagctgcacccgctcccctgctcttgccagcagggctggaggtgggaagggccactgctttgggccaactctcttggttgagggtttgggcccttgatctcctgggagagtttggcaggggtcctgggaaactgggggctcattctgcgtctccagcccatctagctgcagagggaggctactcctgggttctagagacagctacgctgtggggcctcaggcaaagcctttctgggttctgtgcctcagccttcctcatttgtcaaatatggcggtagaaagggtggagcacagctgcctttcatccttaaccttgcagggagtttgcccttccttggaccttagctctctcagctttcatgacgtttagtttcccactggccctgggggagaacagaggtgatgctcccactctgtagatgggctcacaaaggcaagagggagcaatgatgagtcccaggacacatagcagttcagagtgagcatgtggggcatcgttttacacctctaccctaaagcctcccctttatgcagcccttgcttgggctcagcaagagagggggttctggctcagctacttctgggctcagctggtctgcagcccaggcagggactctgggccccccgcccagagtagaactcaatgctgccccttgtctgcccacccccagaaacaaaggatgtggcccagtgcctggtgttggcaggctcccgctcccagctaaaggaggacatagcagggcaggtagggctggagctagcctgaggcagctgctggaacttgggggtagggcggaggggctcccaagaggtcctcaatctgtccacaattctagctttggtgctggtgtaggctgagcatcaagtgaagctgctgatactcttaaacctcaggtttcatgaaggcttaggcagagccctgactcaaaatggtgggctcagcctctaggtatgtgtaggggagcttgagtcatcctggtgaaatcgggttgaaaccctgtgccccagagccaatgctcatccaggcccctgggctagaaagcaggtcagaggactggaactcaggcagcaggccaaaagcccccacttctttttcctttctaaatgccccccctccccccgctcaggagtctcagttgagaaagtgacttcttgtttctcctcctctgagtatacaaccagagggaaccgattgaaatagcaactacagcagcagggatttagggcagaccagaaagaattcctcactcagtgctcaacctctagaggtctccgatgtcctaggatcagggcccagatattttagagcctggcttttgagatgtttaagtctgtgggctttttttttaaagtaaaagtctcccttatgaagttatcaaaattctaggaggtgagggtcagtgtaaacgggcggcgtcccaggtctgctgttctactctcctcttttccactccatgtttgaaaacccaggttaaataatcttaactggacagtggtggttgagcttccctcaagggcccagaattcctgagaagtggacccgcctccctccccaggctcttgttctctaagtgagacttttcttctggagcctaccccagtgttcccacacttgcctcgttataagaatcacagaggagcataccccttccctgtagcttctggttcgggaggtctggggtagggcctggtaatctgcattgtaccaagtccctcaggtggtgtttatgaccaggcaagtataggaagtttgagcctcacttatatccctgttgttgcccctgcagctcattctgctgtagcctagaagggcagccagtgcctctcttgaacccccagcatccctctccagagcagagtggtagccaaggcccaacaaggggaggaaggaagtggcccagccagaactgggagaaatggcccagattcctgtttctgtccagggcatttggaggggctgatctgtgtccccactggcagaggccacttgcggagggggttagcctagcctaggtggggccaggggcagacaggggaggaggggagagccagaacacagcctgttacacattacatctgccctctacatctgggattaggttgggcaggaagcctctgggaaatgtgggctggtcccaacccatttgaaacagtggcggtgaagatgatgggtaaatgggtctcctcattttacagaagagaaacagacccagaggggagtggggctggcctgggcaggccagtgaggaggcctgacctggactcacacgaggtcatgcagggagttgggcagagcagggcctgactccccttccagtgctctccccagagtgccccttggcggcctcctcatgagtccctcctcgcagctgggtgagctctgatgggggcccgggagtggaggggaaccccaggcctcctccttcctcccagacagctggggctctgggcgctgtgtgtggtggaggcagcccgggctctctgagaggctcccgggtggcaccgcccacccagcaccctggacagcgccccacgctgggctatccctgtctgtctccaggcttcactttggcttctggggtgggccctgctccaattaggctgcgtctgttgacttccttgcctcctctcttaactcctccttgaagatagcctcccagcctagttatctccattaatcacaaaggtaagtttcgctcatctttggctcctggagccagggtaagaacacgggaagaggctaggggaccggctgctgacagcctgtggtttgtcaccatcactcaccagcgggaatgggagggggccctactggacccttctccacttcctccccacctggatcttcctcagagggctttggtgaactctggcgggcacagcagagacacaagaggtaacacgaagggcagggactggggcatagtgggctggccagggtcaagggtgaggtgaggtggctgcttgggcaggcagtgagggcagcatggcccgaacccacactccagctggaagggccccgaggaggtcatcttggccatctcccactctcaggcaggctgctctgccactggttctgctggactttaggtgccccccagccccagtcctgtctgaccagttcttcctctctccacccactgccaggtctagaggagtcccaggagcagccaggacaggcggaagcagtggctgccatggaggaggacaagctcttatctgcagtgcctgaggaaggcgatgccacccgtgaccccggtccagagcctgaagaggagccaggggtccggaatgggatggccagtgagggcctgaacagcagcctctgcagcccagggcacgagcgaaggggcaccccagcggacactgaggaacccacgaaggacccagatgtggccttccatggcctcagccttggcctctctctcaccaatggcctagccctggggccagacttgaacattctggaagattcagcggagtccaggccctggagggctggcgtgctggcagagggggacaatgcttccaggagcctctacccagatgctgaggaccctcagctggggtgagtggatgtcttgggatgggagctcaccacatttggctgttctgttgttgtgtggcctgggcttagccacttagtttctccggttcttgtttttctcacacataaaatggggatttcatatccctcttttgcccagattctgggtgttttgaaaggacagagccttgacggagaattcaaaggccagcagattggggggctgaaagttgtgccatcgtgagctgcttctatgtggattgcagggggtggggggtgctgccctccctccatcccaagctgggcattcgatttccaagtccttttaaaatgcccaatgtgaaaattcatgtggttcatttctctgcttcctggaaatgagactctcccaaatccttcaactgactccaggaaagccggctttaggctttaatccctcctagctactctcacctgcagtaatcgtcaggaagttctaccagggatctcacttcagtcctgcttactggagttacagcccaatttctgttgtcctcagcaggcaatggagagacctggagttttgggggtgtgttggacaagcagggcagggaagggacagagaaatgtctagaaggcaccagggtggactgagaaaagaaagcatttagaagtcttagtgtgcatagctgcaggctctggcctgaaagggcagtgtacgggtagtgtgtgagtgtgcgtgggggcatgagtgtgtgcctgccctgcatgtcatgtgtacacacggatgtgtgaacgtgttggtatgcatggggttggtggctgtgggtggggggtgttggtgcccctggcctgggcatttgtggctgcacatttgggcacatgttcgtgttatgtagggataagtgtctctaagtctccatgggcaggagtatgtgagtatgtgtctgtggcactgggtgtgccatggccctaagagtgtttccatccaggcagggcctagggcagccccatagctggcagtggggaaggggcaggggactggggcttcttagagcacaccgtattgaggtggcatctttacttgggatggcgaggctgggggcagttggaggcttgcagattggactgatggtcttcaagctcccatcagggccacccctcagccttgctcagttgcatgagggggtgggagatggggggtccattggtggctctgaccctgggctgagagctccccacaagcagggctctgtcttgtttggatgtctctagtgcccagcacaggcctggcagaggtgtctttactgggctgactttgggtatttgccctggtggccagggcaacgaaccttctttcctctcctttccttccagaggtcagtagaggaaacttccaccccagcccctgccaggcattctgtgccttttagatttctgtccccctccccactttgttccttggcaagagagagcctaatgaggctgcagtctcaggtcctgctggggctggagtgggagtgccttctccaggaagcacactgggacagaatcttaggcactggggggccaaggagatgttcgaggggaaggggcacttcccagtcctccaaatacaactcagtctctgctaggcagcaggggctgggggaacgtagggtggggccagagcctcaggggaggctgatgcagagggaggggagtgcttctttgcacatcatgggcctcagctgatctgaaatgggctgggctcagcctgctgtgttctttccttgtgtctcttcctgttgctggctctatcttccatctctatccttgtctgtctagctctttttttttatttgagacggagtcttactctgttacccaggctggagtgctgtggcacaatctcaactcactgcaagctccacctcccgggttcacgctattcttctgcctcagcctcccaagtagctgggactacaggtgcccgccactacgcccggctaatttttgtatttttagtagagatggggtttcatcgtgttagccaggatggtctagatctcctgacctcgtgatccacctgtctcggcctcccaaagtgctgggattacagccgtgagccaccgcgcctggccgtctgtctagctctttctttctctcactttctgtctctgttgtcctctcgtatccctttcctctgtctctttcttgtccccttctagtggtcttactctctcagtctctctctccttccttccctgtgtacctgctcatgtccctggtggataagaatcttcccaggctcctcaggtcatctatgtgcgatgctctcttccaggtgctggagatgaacaaaacatacaaaccccttgctctcatggagcttacggtctagtggggagaccgacgataaatattaaaacaataaatacttatatagtgtgttggaaggagataagtgctttggggaagaaaaagtaggaaaaaaggggctggggtgtttggaggcaggtcatggtttagatcgggaggtcggggcagtcctcactgagaaggggatgtggaaggagggctttagctggggaagaacactttgggcagagggaacagccagtgcaaaggcctcttttgggggacagcacagggtcctgcaagggcttgggaagcgtggttggggccatggggctgacaagcatatgttcattcacccagcacatcattcagccagatgttccaagcacctactatgtgcggggtgctccctggctttgcaaagcttttgttctggggctggggatcatacagtaaacaggggaacagacagaatcttacatgcctggaaggtctgaggagtaaatgaacagatcccggagcaggaggccagtgtgctgtgggcctgcctcccctgctctctctgaggaggtggcaatgaggccagacctgacagctgaggtgcgtttggccgagctaagaacctcccaggttgtgggaagagcaaaattatgacccagtgtgacactggttgtgataagatgttcacactgctttgggagcctggaggaagcagccctctaggccgggctgggggacgaggccttacattcattcatttagacacatatctgatgcccactagttctccgtgggcaggagtgtgagtatgtggggttaggtgtctgtggcactgggtgttccatggccataagagtgtttccatccaagcagggcctagggcagccccatagctggcagcggggcaggggcaggggactggggcttcttagagcacaccatattgaggtggcatctttacttgagatggcgaggctgggggccccggccccaggtctgctcttttccctgcagtattcccagtacccagcctggtgtctggcaccttgtgctcagttagtattggctgaagggataagtgaataggatgggggagtggtgtgcccccagggggctcccagacacagatgagtgtagtcaccagcacctgtatgggggacagcttggcaggatggtgactggctccttgcatcccacaggttggatggtcccggggagccagatgtgcgggatggcttcagcgccacgtttgagaagattctggagtcagagctgctgcggggcacccagtacagcagcctcgactccctagacgggctgagcctcacggatgagagcgacagctgcgtcagcttcgaggcccccctcacacccctcatccagcagcgggcccgtgacagccctgagccaggggctgggttgggcattggggacatggcgtttgagggggacatgggggcagctggtggtgatggggagctgggcagccccctgcggcgctccatctccagcagccgctctgagaatgtcctgagccgcctgtctctcatggccatgcccaatggattccatgaagatggccctcagggcccagggggggatgaggatgatgatgaggaggacacggacaagttgctgaactcagccaggtgaggcagggcccaggctgggagaaccaccgagcagatggggaaactgagacccagagggggcaaagcaggttagggtgactcagtgtccagagtcagcatgccctcttcaaggtcacctggtctaccctctgcatccaggcttcccaccctgtgtcctgaggtttcattctgctcttccaggccttctcagccccggtagaagtcgggggagtcagggaactatgctgtgagttcacttgagaggttcttctgaaagtctgatttcattccctccggctgcagtggagcttctttccctgttctggcccctacatggtttgcagtggcctggggaaacctcccagcctcctctggggcctttgaccctgggcctctgacgctactcttccacccaccttccatctgcagtgaccccagcctgaaggatggcctgtcagactcagactctgagctcagcagctcggaggggttggagcctggtagtgcagaccctctggccaacgggtgccagggggtcagtgaagctgctcatcggctggcacgccgtctctaccacctcgagggcttccagcgctgtgatgtggcccggcagctgggcaagaagtgagtgtgagctcccctgcccccaaccctgggcaaacctcgtgtcttcctcaacctgaagagggtgtgggtgaccttcttcaggggtgccaggtgctgggggggcactcccaacagttccccaaggacacctcctcccgccactgtcctcattcctggcctcgccctaaatctgtttcctttctgggctgcttgggcgaagctgatgctctcggggaggggtggtggcgggcagcccctcagggctgggggtgcgggatgtgggatgtggttatggggccacgatggatgtgaggacagagaagccagcaggagctgggcccagctaatggggccagggagaaaggagaacccgggcctcgggggacacctctgggacccagagctcaggaaagggctcctggccttcattaagccctactatctattgggacaagctgaaggggctgaagcccccaaagcacacaccctggccttcagaccaggtgcaaagggaactggctagatgagggccccaaaggggaccaggggacaggcgggattgcaggaccgaggaagtctgccggcacattctgctcacatctgaccaccagtgtgaccacccaccacctgcccctggccctttcatccagattgcctcccaacgtccgcattaaggctctgagctgtgcaggagcaggcctggccctgcagcactgctcacagggctgggagacagtccagacccttgtccatgagtgggagatgacatgcaggctaggcctcaggatgccctgagggcggctcaggtcctggatcctcctcttctctcacttcttctccctccctccacttctccctccaccctcctcagtctccacgctgctcctgcaccaggtccccaacaactgcgccagcccagaaatcacaactcggatgccctcacctgttctgctaggctggacccccaaacctaacgccatcctttcaggagccttctttgtggcctgcccctgccctctcccatcttttcaaccactccctccagcagctaattgtcctcaagtctctcccatctgaaaaacaaaaagtgtttctcaaccccacttcctcctctagccaaaattcttggattttctgcccagggtggcctctatcccctttctttctccacactcagcccctccacactggtttcctctccccacaccaacttcagaaacctcttgtgtcaaggtcattggtggccttgtgtctttgaatctggtggttgctccccaggcctcaccttagccccttcagcagcttccacgagactggccatttctttctttttctttaattaaactttttattatgaaaatttcaggccgggcatagtggctcatgcctgtaatcccagcactttgggaggccgaggtgggcggatcacctgaggtcaggagtttgagaccagcctggccaatatggggaaaccctgtctctaacaaaaatacaaaaattagctgggcgctgtggtggttgcctgtaatcccagctactcgggaggctgaggcaggagaatcgcttgatcctgggaggcggaggttgcagtgagccaagaccgtgccactgcactccagcctgggcaacagagcaacactccatatattaaaaaaaaaaaaaaaaaaaaagaaaatttcaaacaaacacgaaagcagaggaaaaaaatatcaaacctctatatgcccattactgagtttcaaagttactatttgcttcattctcatttcatctatgacccacagcctttttttcatgtgctggaagattgtaacgcatatttcagacactctatcatttgatttataaatactttagtatgtatctccaactgataaggatctttttttacataatcatgattctattataatttctaacaaaatgaacaaaaagttcttaatctctccaacattcagtctgtgtttaattttctctgattgtctaaaaaatgttggtttattgaaatcaagattcaaacagggtccacacattgcacttggccgattggtctgttaagtctcttttaaccaacaacagttctgcagtttggcggtcctcctcccttcttaagtgccgtgtatttgttgaagaaaccaagccatttgtcctaaagaatgttccacggtttggatatggtatcctgatggtgttatttaacatgtttctctatttcccatgagtcctgcaaatgggcagcgagctccaggcttaattagaatcaggtggaaatttgttctagtttttgacaagaattcctcatgccagtcttcttgaaatacagtcttcgttggcctgcaggacaacacaccccacctctggctgctgcttctcagcctccttcgctggctcgctcctgggttcccaccccgattcggggctctgggccggccagcttgtctgtgccctctcctgttgcatgggctcagccccaccctgagctgttactgaccagctgtgaattgatgactctcacacggatgcctcgtcctgaagtctcacatctcccgcaggggaccaccttcttggtcatgccgcacgtccattccatctccttgtcttgtggattctgccccctaaatttctcttttccccatcccttctatctctatctggacaactatggcagtccccctgtgggtctccactcagcaggtagcgcattccaaaatacagactgaccatccctgctttaacctttctgaatcaagtcctggtccttcccctggtcccggcctcatcacttgctgccccattcttgctctttaggttctggccacatggccctgctagtagcttcttggacatgccatgcagtttcctccctggggacactgcatcatcccacccctactcccttcgcctggttagctcgtaattccctgtgttgactgagacatcacctcctccagaaagccttcctgacaccccaagaccaaggttgaatgttatggcccaactagccagcagcctaggggttgagcaggtctagggggtgggtgggtccgggtaccctgggcccaagtaatgcctgtgattctgtcatccttgggctggaccctgcttctaacagacatcccatactctcctggcagcaacgagtttagcaggctggtggccggggagtacctcagtttcttcgacttctcgggcttgactctggacggagcactcaggtcagtggggctgggacaggcagtgcccacaagtggtacaggctgcacttctggattctcatgtcaactctaccataaacttgctgtacaaccttgggcaagtcttttgacccctggtgaggctgtggggaaggggccacaggagcagcagcggcccaacagttaggcgagtgcccactttgtagtagctgttaggatgtgagggtggaaatgtaattgtgactctaggagaggaagggaggctcaggacttgcctgtattgagcacttcctgcctgccagatgctctaggtctttactcaccttgcttactgcatcctctgtacccagtaaggtaggcactatcattcctatttttcacatgaagaaactatgggccagagggataaagagacttccccacagtcatcgaaggaggagatggtaaaatgggattttatctcaactctattggtgtttggacctagggagtagacctcaggagggccaattgcaggttcccaggagcaggagggtagaatggatgggtgcagccctgtagtatctagcaggctctggtggcaggggccagctgggcagatactggccaggtcctaggagagatggatgcatctcagagctaaggggtagggtgactcatgcacgttagacatcttgactgtgttccacatgtctcttacactttaaaaaaatgtaatttctggtcaggcacagtggctcatacctgtaatcccagcactttgggaggccgaggctggaagattacctgaggccaggagttccagaccagcctgggcaacatagggaggcccagtctctacaaaaaagtagaaaaattagccaggtatggtggtgcaggcctgtagtcccagttcctcaggaggcttaggttggaggatcacctgagcctgggaggttgaggctacagtaagccatgactgcaccactgcactccagcctgggtgacagagtgaaaccctatctcaaagaaacaaacaaacaaacaaaaaccacatacaaaaaaagtaatttccattcttttttctctgcttctgttgggatattttcggttgacctgttttcacttcacttcacttacccttttctgtttgtaatatgtcattaacccatttatgcctgaggttgcaattttctgaattgcaaaatcagaccttggcgatcaccttgagcagtaggatataaataactcccacatgcttagcgttccaataatggaaccataggcataaatgggttttgaactcatttattgagttttgaatttatgttatattttccatttctagaatttccattttattaaaaaatttaaaaaatagattctaattctctgggtgaattatccatcttttccattattttctccacctttccctctctttttttgaacatattagttgtaaagcccttgctgctaactccagtatctatcatctgaatcatctgtatctgtttctattgtctcttttttctcttggttttccatcatatatcctgtctctttgcatgcttaataacttaaaaaaattggatgctgtatactttgtatagaattgtagtggttctagattattctgtgttcctccagagagggtttacgttgtcctttgctaggcagttagaaggtttgtggggatgcagtgctaatccaattaaggttgcactgaagtttggtatggctcagggtttgctctgataatagggtccaggccctcggagttttctactgggagcctcatgtgttcagttgggcaaacccccttgttggctcagaagcctagttttgtcttctcagtgcagcaacactgccccctcttcaacaaaatatccctctacttctcagaggttttctgcttagccttttagcctcctgccttttacatcttttatatctctgaaattcagcaactatctcaaagggaaaagtggccatgtgtttacagcccctgaagtctccagcctcttgaagccacccaatgccctgcctcttgcctgtgcccataatcagcaatgcccccagggaaaaagcagctgcagaaggtcaaactaccttcccgcagttctctcctctccagaatcttggccctttttgtctttgttgcctcagcaattttccaatatcttaagaaaacccatggtttttattgttttcagtggaagtgttggtgtgctgcaggctactgtatcctgagctgagttgtaaagattgcgctagaatgaggaagattggtctggcaaggtgttcagcggggtcagctcatgatcagaggtgtgggtgctagactgagtgccttgtatgccagcccaatgctgaggctcaactgtgcaggcactggagagccgcagaaggtactggctgcaaagcaacattttggaagcaaatactggccccaatgtactggtggcctttgatctagaggcatgtagccttctgaagagggtcaggtgggagagaacaagcatgaggttgggcagaggggaaaggtcggtgtgagaggctccacagagggaagagtaaaagggctgctggtgccaagatgtggggagggtggacagtggtgaggctacccctagggacagcccaagagtttggtggtggcggcacggggttgcggcttggggcagagtgtccagggaaggggagtttgggctggggagtaggagttgggatggatggctcataggtaagacaggctacggtttgaatgggggaggttttgagaaagtcctggaggaatgtgagaagagggaggggccaggctgggggacagatgggagaagagaacgggagcaagagagacagggagaggaggacagcgagctgtcagacagggcagtgctattatgcagcagttggttgcttgggattggatttcgagagtactctgcagttttggatgccttgaggcacctcagagtgtaagggctggccaagtcatggcttgcaggtcccagggtgccttaggaggtggcatgagagagggtaaagcaaagtgggcattgcagcattctgggccaaaacgaaatgaactatagcaaaaattaggaaaaaaccatcttctgaactcaagactgatggagacaccaatggcctcagcctgtaatctcccttcccaagggaatgacctttatattgggccttgagggagattcagagctgcccagcagaggaaggacgggtgtcctgaaggcctggcctgctctgaggcactgaatagtgaaatgcctgttctgtccaaggtgtagcaggcgggtatgaggttggaggcagaggagggtagtctgggcagtgaacatggccatgatatgaggagccttggtgctattctgagggtgccaaggggccagaggttgttttttttttttcttgagatggaatcttcttctgtcgcccaggctggagtgcaatggtgcgaccttggctcaccgcaacctctgcctcctgggttcaagtgattctcttgcctcaacctcctgagtagcttggattacaggcatgcgccaccacacctggctaatttttgtatttttagtagagatggggtttcaccatgttggccaggctggtcttgaactcctgaccttgggtgatctgcccaactcggcctcccaaaatgctgggattataggcgtgagccaccgcgcctggcccagtgatggattttaagcagtggtaagtcctgcctatgtgtgtatttagaaagacaacttagtgtcagcagggaggaggattgggtgcaggggtggccccgttgtcctgggcacatgatgaaggtggtggcagcagaggaggattaaggttgaggttgaagaacaaaccatcaggatttggtggcaactcaaacttggggtaggggaggagttgaggggccagagttgggcctggggctcagctggtggcacatgaaagagaggggatgactgaggaggagcattctgaagggcaggcagggacagggtccggctgtaggggaaggagcaaggagtgggcatccaccctgaagaagagcaggtgctgaggtgctcttctgtctttgttcttcaccatctgtcctctgcctaatttcagaaggtccctggagggcaatgaggactgaaactctaaagcttaccaggtcccctggcctcagcactccagagtggccatcctgggggccagggcctcctgggcgtggagagagcatccagacccagagagtggggcactggagccctggccccctagagtgggtgtgtgctgtgtgtgtggggggtggtcttaccctgggtgaggactcagactgccctcagcagctttgaattgccttccagaacattcttgaaggccttcccgctgatgggggagacacaagagcgtgagcgggtcctcacacacttctcccgccggtactgccagtgcaaccctgatgacagcacttcggaaggtatggccccttgcccactctgcctgaccctccccacccactcagccaggccctggtcccctcccatcctggtccacctggcacttcggtcctgttgccaggcccagatggtttgtcctctctggcatgcagtaggtgctcaatgaatgctaattgaataagctatggcacacggtctgcctgctgagcaaggcgcagtcttgcctgttctcctccccactgcctggaagtccctccagcctcgggattcagctctggggctctcccttctctggggtccctgtcatggtgctggctgttggtgtggtgggggtctaggtcggggtcctcttagggacaggacttgcccaatagatgggcctaagtcccaggaactaggggacaaggcccattattgggagagacacaggtcaatgcaggggcagggctgggagctcagagctatttctgggtctgaggttcaaggtgagtttggccacaggaggcaggagtctgggccagagtgggtccagggtggtcaggctcctggggcaggcaagtgacttgggtcctgcagttggggcagacctggagcgtcacacaggccctgtcccctgaggtgagtttggcaggcggccggcctccctctgtgtccaaggtctcctgacgggttccgtcaggagacagggagtgggaagaggttggatcctcgcactgagagtgccaccatctctgactcagatgggatccacacgctcacctgtgccctgatgctgctcaacacggacctgcacggccacgtgagttggggaggtgacggggggtgtcgcatgtcctctcagggacccaccttgtgttgatcccggccccttcctgagatctcttactcagtggccgggcttctttttgaagcggtgggggttgggcagcttggcttctagatttggccccgccctagtttcatccacctgtgatccacctgagtccccacccccaagtatgccagtgagagcagctgggccacgggagtttaagatgagccacaaatgtgtgcctctcgtccatgctaagagatcatgtgccctttgtgcccctgtcctgcaagtctgaatgcagctgcattgaaataccgtgctcggggcagcccctcccaaatccccggcccctaccaggccaagcagtgaagtgactggtgtgggacgcccaggctgtgaggctgtgtctggtccaggccccaggctgtctcagcacttctcatggctcaataactccttcttctttcctctatctgctccgggacccctctctgggctctcttgccctcgcaggtggtaagtgtagctagtggtgtgcatgccctgtgtgccgaggcccccatcaccatgttgcccttctgtgtcccccatcaccatctggctccaccccatctctgccccatcattgctcacccatggtggttggagccccctgctaggtagggaatatctcagtgactcatggggacaacaggccagcaagttaaccaggaaatccagggcatatgggggtgaaagaaagagctgggatagaccaaacttcagattctactcttgcctccacgtggtagctgtgtgatcccgggcaagcactggccctctctgggcctcaggttccacatctgtgaggtgggaataatgatctccctgcggtgtcatgggcaggactgagagaggtaatatacatggcaccaaggggcagggtctggcacctagtaaggatttcattatgaagaaaattgttacgtaaaaagaacaatagtattcctcattactgtgaaaatcgaaccaagggcaagctggaagacccagcctgcaggcccctgtagggcaagattgtgaaggcccagtctgctggcagcctgggctcatgggtgcactggggcacctggcctggggagggctagagcctcagtgcctgcgtcaggaagagcaaatatgcgacagcttttgccaagtccacctgggcatgcaacctgagtgtggaacaagagagaagacgcattccatatgaatgtcactcaccaccaaagcccatgagcctgctgctgttcccctagactgtgccctctgtttattgacagacagcagtgttgctggcctgctttgaaaggagcactcaacaggcccctcactccctgtccccacccctggctgggcctccctatggctaagaactgctaaggagggcggcagccactgtgtagtgaaccctgggccaagagcaccccgcagcttggtgggccttagctggcatggtctcacattgatgccacagctgaagagaaatgtcagcacttcatagattagaagtgggttgggatgagtgttcatgtttgcagcagacagacactgaggctttcgtctctctcttgttttttttttttttttttttgagacggagtctcactctgtcgcctaggctggagtgcagtggcgagatctcggttcaccacaagcctcgcctcccaggttcatgccattctcctgcctcagcctcccgagtagctgggactacaggcacctgccaccacgcccggctaattttttgtatttttagtagagatgtctctctctttacgtggtactgctcagagattaggagcgcaggctctgaggctgtgttctctgttgctccacacgaaggctgtgtggcctgagacaagttatttacttcactatgcctcagtttccccatgataaagtgccagtgtgtaaagaatgtgaagtaaagctcgtacccaaggcctggcggttgcagttactgggagctcttcagagcacctgatgctttgcacttttccccttgcctcctcccctcccacgtcactcatcaagcagggactgaggcctggtgggttgtggggatctcgggaacaggggccctgcgagtccccacaaaaagagctctgttcagagcaggaggcagtaaggggctatcgggctataggcatgctcctgagatgggtgcagtctggttgaggaactggggaggatttgtgtagaagaggcgctgggacccttgaggttggaggctcaacaacaaccctgcttttgtgttccatgaacaagacaagaaagggagccccaccagttacaagaggtggacaacacagaagtgaacaagcgattacaagttgtgcagctccatgaagggcacacacaggaaggtgtgatgggtccggtctaagggtcagggaaagcctgcaaggtttgggcagagacctggatcagcgggagccggccatggaaagatctaggaccacgcatttcaggcaatggggccagcagggctggttttcaccttgtggctgttgggaatagcgctgctgtgaacattcgtgcacaagttttcgtttgaacacctgttttcagttatttggggttcctaccttggagtggacttgctggttcatatatctggttgttctgtgtttaattttttgaggagctgcagaactgtttccatagtggtgtttgtttacatccaggtgggagatgatggtagcgtgggtagaagggactgacaagggagacctttcaggactgagtctaacaggacttgctgatggggttggtcagtgaaagagaggagcaagggtggctttggcatgtggctagctgggggtgccatttcctgagagggggaagaaacttctgtgtgggggtggtggtgagtgggagagggggacttgagtcccgattttgacctgtgtttctgatgcctctagacatcagtgcggggaggccaaggaggcagtaacatggattagtctgggcccggtgcagacacttgggctgaagacagagatggggtggggtggaattcaaagctatgggactggctgattgccatgtccctgcagagagaacacactgatggccaagtcctggggctcagcgttatgtagaggccaggcagaggagtaggagagactgcaacgcatccagggatgtcggaggaaactcatgagtgtgtggcatctctgaagcccagacaagacagcatttcgaggagaagggagtgagtggccaactgtataaaaggctgccatgaggtcaagtaaagtgatggcgcaagagtgaccactggggttggagtggtcatgggtgggatggtcaaggtcattggagacctttataagagcaccttaggtggagtggagaggacagatgccaggttgaagtgggtgagatgagctcaagaggcgagggtgtggtggccatagacagctcttaagatgtttggccttgcctgggggcctgacaggagccagcggtcaagtctgatgttaaaacagcccaaccttgtgcatgtgccaccaggatcaacccaacagacaagatgctgccactgcaggagagagaagggacagtggaagcttcccttgagatgagaagcagagcacaggtgggaagtggcctttagtgtgagtggggaatgttgacccatctcccacgttcataagaaagtgaggcagaaagtggaggtgctgcagtgggcttggtagctctggcaatgagaagatgaggggcttctgatggcttctacttctaccacgaagatgagatgaggtcctgagctgagagtgaagatgggaaggggactgaccagtcaggatgggtttagttaaggtcacaaaaaacgtaacacccactagctttaaaaatgacagctacttactgtttgaaaagtgtagagtcaggcagggtccagggtggatttgaatcagccttacctccagttaagaggtgatctaatttcttgtcattttcttctgacagtgatgtcagcctcatcccaagcctggcttcccctacatgggcccgatagatgcagcaattccaggcctcacagccacacttcactgcttgctggagagagctggtacccgaagtgtcttcttaggagctggagtcaggaaggcttctaccacagaagctcccagaaaatggctttcaaataccgttggccccagatgggtcatatgccattttctgaactggtctctttggcccagagaataccatgggacagttggaaaaagcctaggttacccgaatcaatctctgtggcaagaggaatgaggtgatccagggcctagccctgggctagaggtggggtcattcttccccacccacacctcattgctgatacataatgggaaaagggttttggagagagagagccacagtgtctactacagggactttgaggcttaagggaaaggaaaagccatgccatgttcatggaggatgagagcaaacacaggaactgtggcagtcaggagtctccatgcccatgtggctgtggttatagacataaaatcggaccaattagcacagctgtgtgtcctacaagtgtatttggttggacttggatacaggtacagtataggaaatcagttgggtttagtcagtgctgggctttttctaggcacatatgacagaagcacaaaggggcaagagagatgtctgcagggaagtggttactgatggggcctgggatctaaactggataaaaaagaaagagaggacctttgaatcttgtattagtccattttcacattgctataaagaacttccctgagactgggtaatttgtaaaggaaagaggcttcattgactcacagttccacatggcttgggaggcctcaggaaacttacaatcatggcggaaggggaagcaggcatcttcttcacgaggtggcaggagagagaagaatgtaggaggaacttccaaacacttataaaaccatcagatctgctgagaactcattcactatcatgagaacagcgtgggggaaccacccccatgatccaatcaccttcctcccttgacatgtggggattacaattcgagatgagatttgggtggggacacagggcgaaactgtatcagatctcaacagaggatcaaagggttgttggagtgagggttctaaagaatgggggaggtggaagagcaggagatgggggtcaggagttgtatttgaaatgggggttttggagatgatgccaatgctggtgatgatgggtgatgacgggtcagcaaatgagcctgggatgcactgagtgggggatgtcagagaacggtgattcgcaagctccagccatgagaaaatggcagtgtgggttagaattggagacggagaccaggagagaaattccagaggtatttttgttgcacagcctatggcactggtcaatggactgaaggctggggtaagcgggggagaaccaccagggttgaggcaaacagagaaggaggggtgggtgggagaagtcattccaggagagctcaagctgaaacaaagattaattgtttttcaggaacagcttaatttctctccaaccttgtgttgcctgaagggtggcaacagcgggagtttctggcgaagcgcattggggctggatggtggagggctggagggacaggccaggggtttggatgctatcctgaggtctgcagaggtctgcccattctcagatggtgacagagcctcacacaataaccttaagggaataccaagtataattaaggtttagcctagatttgcaaatagtggcaagggtttttctgccataggacctttgatcagcccctcccctcctcccgaaggatgacgtctgcttggcctgcctcatcctgcttctgaaatgacccttaaagacaggctagcattgttctgatctcagggctgtgcatggaaatcagacttgtgggaaaaggcctggctcctgtggggcaaaggcagtgacacagttttactatgtggatgatggcctgggcatcaccctgtacccgtctagcctctactctgggcaaggagatgagtttgaggagatggtcaccctggccctaacgtgccagggtccaggccttgggatggggcagtggttggacccgctgtgactttcctctgctcggagacagaggctgtgggaagaagtccaagggctcaggaaagactgggaggccctgtagatccaaatggggtgggagggaggggaggaactgggaattcagaggccccaaatcgtggacctcccttgggctttgggatgatctgggtgcatgtctttttgcctggttgtcattataagtattatattttaaagcagataacttacccagtataatttcacttctttgcatgagtcttgctttttcgccctgagaaagatcaattctagtgaatgtttcatgtggacttgaaaagaatatattctgtgtgttggttacaatgttctatatgtgccagtaaggtgcctatatgtgttgtaaaaatcatgtatattcttagtgatttattttcttgttatgaaacttaccattttaactattttaaagcttacaatttagtggcactaagtacattcacaatggtgtgcaatcgttgccactgtctagtttctgaacatcttcatcacaacaaaaggaaaccccatacccatcagcagtcataccccatttcctcctccacctggcccctggctaatgctattttgctttctgtctctgtgaatttgtctaccgtagatatttcatgtgagtgggatcacacaatatgtggcctgttgtgactggcgtctttcatttagcatgttttcaagattcattcatgttgtcgcatgtattagtagttcattttttatggctgaataatattccattgtatggatatgccacattttatttatctgttcatctcttgatggatatttgggtcgtttccatcttttggtgattgtgaatagcgctgctatgagcattcgtgtacaagtttttgtctgaatatctgttttcatattttgggggtatatacctaggattgacttgctgggtcataggataattctacatttaactttttgaggaagtgcccaactgttttccatagtggctgaaccattttacatttccaccaccaacatgcaagggtgttctaatttctttacatcctcaccaacccttttctttttttttgaaaaaaaaaaaaaaagatagccatcctagtgtagtgtgatctggtatgtgtgatctgtaatgtgaagtggtatctcattgtggtttggatttgtgtttctctaatgattagtgatgttgagcatttttttcatgtactttttggccatttgtatattttctttggagaaatgtctattcaggtccttcattcattttaaaattaggttgtttgtcttttgttgttgtattcttagagttctttatatatccttgatactagacccttagtagatacttgatttacaaattttttttctcactctgtgggttgtttttcatctccttgatagtgttctttttttttttttttttttccttttgagacagcgtctctctgttgcccaggctggagtgtagtggtgtgatcctggctcactgcagcctcaaccgcctgggctcaagcaatcctctcacctcagtctcctgagtagctggaaccacaagcatgtgccatcatgcccagctaattttcttccttccttccttccttccttccttccttccttccttccttcctttctttctttctttctttctttctttttctttctttctttctctttctttctttctttctctttctttctttctttctttctttctttctctttctttctttatttctctttctttcttttctttttttttttttagagacaaggtctccctatgttgcccagactggcctcaaactcctgtgctcaagtgatccttccaccttggcttcccaaagtgctgggattacaggtgtgagccaccacacctggacttgcttttttttttttttttttttttattgattcaatctctttacttgttataggtctattcagattttctatttcttcttgagccagttttagtagcttgtgtatttctaagaatttgtccatttcatctgggttatctaattttttggcatagaattcttgccaactttttgtctgcttgttcttcctgttactaagagagcagtgttaaaatctccagccaagattgtgaatatgtcttcttttggttttgtcaatttttgtcttgtatattttgaagctatgttactagatgtatacagatttaggatgattatatcttctggcagattgacccttttatcactatgaacatgtccgtctttatgtctagtaatgcttcttgccttcgaatctattttgtcagacattagtgtagctatactggagttcttttgttagtgtttatgtggtatatctttttctgactttttctttcaaagatttctgttcttttatatttaaggcatatatcttgtatcatatacttaaaaataaaatttggtaataatgttaatttgaacatttaatgaattatgatatatttgagtttaagtatatcaagtgactgttttctctttgactcctctgttctgtttctttttttttcttcttttgcctacttttggattaagtatgttttagaattcaatttccctgctctgttagcttgtttgttgtgcattctttcggaattccttctatggttggcaatttgcattcttgacttataaagtacttgtaccacttcctgggcaatgaaataccttgaaacactttagttccatttactgctctcttaacttacatactcctgttatcatgcttttaactattatatctctctatattttattccctgggaaactttattgttgctctacatagtcgatttccatttagagttaccaattctttttgttatttcattcatttctgcttctccacatttccatctgggatactttttcttcttttagtattttctttcttaatttcaacttttatgttgaagtgtgactggggtgtttcccaggacccttgtccttggtggaccctgaactccaatctcttttctccaatcctaagaggccacttagccgctcagcccctggccactgctgggaaggagcaggtgcttcggggaggaatgctgctctttctggggtcacctctccacactcccctgcaggatcctcacccttgaagccttcactgcttttgtaaagcctccaatgctgctgggaaggttcacccacaagaagatagtctgatattgctcagattagaaatcttgccgtgttattttttgattttgtgctcctgaccgatggctggggaatgttcagtttgtgtggaactcaaagacagtcttaccaacattgccctcataatcctgtattgcaaatgtacacacacagctatatacttatatatctatacacacatatatatgtaaatctacacagaaaaatacaaaacacacttgtatcaaggcatacataggatcttttctcctgaactagttggaaaaggcatagaaagttcttgcttgtcagctacttataaagccttgcatcattgttttctgaatgatttctgtggtgtgtgaatgtcccacatgatgctaatagagtgtctttgctaaaatagtgccaatgtcagtaaacttgggaaatgacatggaatcctctccttggagacaccagcacaaatcagcatggtaaagactctgaaacatgtaaataaagttgttctattatgaaatctttttttgagagaatacctatttccatctcctggaataccagagttctgtaggtaaaccttggaaaacactgctttagagcaaaccccaatccacaaaatccttcagtgataagtatctggtattcaagagtcttcatcctcacaaagatgaagtgctgttcaatgttttctcaaacgtggggactccaaggagagtctggaagtatgaatattaggtgttgggtttgcagggtttgagcccctctgctactcattggttaaaacaagaaggcagaacttggggatttagtcatttccagctctttgcctgtttctacctctgagtgtgaaaccatctgcttgggttctctttgtcccagctcagctcagcttagcatggggcacttgtgtgtccatggcaattgatttttgactcccataaactttccctcacttcacctatgtcttggaaggcttgctgcccctctgtgcaggtgagagggcgagacagttgtggcagaatatgcagagcttctgctcagaagccaagaggcctgggttcaagtcctggtgttgagtgactttgggagagttaaccgtggagtagcggtgagagcacgggatttggtttcagacacacttggccttttcacttccttgccttgtgatcgtgggcatgtcacttcaccttcctgtatctcagtttccttacctgtcaaatggggataataaaaacaggcacctcacctcctccttggggtgagaaagaaataagataatgcatgtcaagcacaagacctggaacatagtaggcacctggcaaatgtcagctcttacaactcttcatccagcccaactccttcacctgggctgcagaagaagcccaacctctcaagatgcttgagaatcaagtacagttctgactgtgagaaagagttttgtaaactcttggagacaaaagaaaattcacgcaatttaattttcattattgcccttaatgctgcctcatccctctggctgggcagggcagggtgtgtggggaacacaccagcctccttccctactcttaggcagaaccatttctccattacagaacattggcaaaaagatgtcctgtcagcaattcattgccaacttggaccagctgaatgatggccaagactttgccaaagacctgctgaaggtactgtctgctgagtgtccccatcccactagctgtgccctgaatggatagagaggagagaggtctgtgcctcgtgaaatcctggcattccaggccgttaacacagggtgcagggccatgatgacaaagttagaaaccactgagctcaacatttggctgttctgtgttccctgagttaggcagagggtaaggctttgtgagatttgtttttagtactccattaccaccattactgtcacagtaataatcaacactgctatgaactgtcacagctgccacccaccacaaccgccaccaccaccttcaccacaaacatcattatcatcaccacaaggaaaagcccccctcattccttcaacattaccaggaattaagagaatccagttttcttttgaggctgaagtgaagggtggaactctagcctttctagtctggtcatttctccactgaggaaaaggagcaggtttttggtggctcggtgatgggctcatttttattatttttatatttttgagacaaggtctcattctgtcacccaccctggagtgcagtgatgcaatcatggctcactgcagcctggaacttttggcctcaaaggatcctcctgcctcagcctcccaagtagctgggactataggtgcatgccactgtgcctggcgatttttatttttatgcttttttttttttttatagagctggggatctcactatgttgcccaggctggtcacaaactcctgggctcaagcaatcctcacacctcagcctcccaaaatgctgaaattacaggcgtaagccaccacacccagccagcttcatttttaaatagtgggtttgaagaatctgatgatactacaggcgtagttgaataatgagttcggaggtctccatccaaaccccaatgttccatagaacattgtctccatcactcttcttactatattatattcttcaccattgagaagcgtttgttaagaacatatttgtgagatcaaacaatcccagtcccactatccacctatccatttctcccaaactacccattcacctatctaaccacttctgcacccatccactcatcctcccatgcatccacccagccactcaatcattcacctacccatatacccacccattcacccatcacccatatatatatatatctccccaaaccctcccttcccactcctcgcatagcaaccactcacccattcacccgtcacccacacagacaccctgtactcctcaaacactccccatctactcacctcaacaaacatctccacatctactcacccatcccccatcacccatttccccacccattcacttacccgccaacccacccacccattcatcctcaaatctatcaacccaatcatttactcaatcatccacccaacaccctgccattcatttgcccacccatatcctcatgcatacacccctaaatcttcctcatataccctctgtctacccacccatcttctattcattcacccatccacctgcttgtttccccacccatccttccatcttccacctgtccacttccccatccatccattcactcacccatcctcccattcatcctcccatccattcatttaccctgtcgagcacttgctgtatgtcaagttctggattatgcactggaaattcagtagtgaacaaatggacagcctctgaccttgtgaagcttacagtctcctacgggagattgacattaagtgatcacataattaaataccacccatccgtacatccacccacccactcacttacccatccagcaaataagtatgaatcaaacacccactttgccccattggctgaaaaggtgctccctcactgtacccatgttattggtggtagatgagggtttctttgacccttcacctgaattcccccctctctcttttccctctcccagaccctttacaactccatcaagaatgaaaagctggaatgggccatgtgagtagtgacgatgggcacaggtatggggagcatacatccctgggtgggggagtgtgggggtgcaggtccgacattctgaccactctccatggtgctgatccctcccaatccagggcctgatacctgtgtctagctggcgcacacctggtgttgaattcccctttggattcattttctgtattgagaaaaagagtgcaatgtttgcattgttacagaatagattgaactgtgactttagttctatgatgtccacagctggttttctatatggggatagtgttccaattcccattgatgaccgctcctttccctttgggaagtaggcagacaggaggcatgaggcctctataacctggagaatatgaccacgtttaggtggtgactgttattgacagtgggaaggggagagtgccctctaacttcttcccctgcaaaggcagtgagacctgtaggtctcatcaggaaagaggggtgttgaccttgctgtttggggagaccgtgaaaggctctgctgtgttccccagggcaggcaggtccatgtagaggcctcaggcagggattagcaggaactccaaccccacagggaagagctggcactcttcttccagggctctcatgggggcccaggcttcagggccttacctgctggcctcccgctgccagcatgtcggtggggtttgtgcagcagcttcagtctggccacggttagtgctccctgggatggagagaggagaaggaagactaggaaggagacctggtgacagttaagtctccacgtttgtgatcaagggtgacaatttgggcttggaggacaaaaatcaaagatcagaggtcagaggtcagaggtcagaagtggagatgagaggaggggtcagagatctggatctgtggtctggaattggaatctcttcatctctgcctcctggggctgctcttcctccatgaccctggctcctggagaggaggctggtggggaaaggccatgacgatgcggggccgaggcctccctggaggtggtgctcaggcctagtacttccctagtgatgaggatgagctgaggaaatccctgtctgagctggtggatgacaagttcgggacaggcacgaagaaggtgacgcgaatcctggatggtggcaaccccttcctggatgtcccacaggcgctcagtgccaccacctacaagcacggcgtcctgacccggaagactcacgctgacatggatggcaagaggagtgggtgtcaggctgggagaggggcatgggagggaggctggcacagaggggggcgccacgggccactctttggggacgaacatacaggtggacacgtagtgggaggtggggttggagagactgcagagggtggctgcagccacactaccagtgccctcctccccagcgccccgtgggaggcgtggctggaagaaattctacgcagtgctcaaagggaccatcctgtacctgcagaaggtgagagactgccccagagaccttactcagaaagggccagctcagtcccatcccgccctggccttgtggcaccccgaaggccccaggcaggacctggggctcaggcacatgctgggtccttccccagacttgggccctctcagggctttggaggtttttgggagaacttggtgcccagtggctcagtggactctcagcatgaggcctgttcaggcctctgggacaaactggggtaaggggaggagtacctggattcttgttggggtgggtgaggcagcaggaacagaaaattaagggagccgtagggttagacagagagcagtgaggggaggggagagtggaaggtgtgggtcagtgaccctagctcgcccatcctgccccacccaggatgagtacaggcctgacaaagctctatcggagggtgacctgaagaacgccattcgcgtgcatcacgctctggccaccagggcctctgactacagcaagaagtccaacgtgctgaagcttaagacagccgactggagggtattcctcttccaggcaccgtgagtaggagctggagcccttcactcccacctggggcccagggccacagtgacccggcacacaacccctctccttcccgtgagtcagcaacagagcatgtgtatccacatgacacagaccgacagctgggtccctccaaagcagtggttcccaatgtgtggttcccctcagcatcatttgcagtctctctggccccaccttagacctactgaacccaaaactctgggatggctccagcaactgtgtttaacaagccctgcaggggctgctgagtgcgctggagtctgcaatgtggggcaggtggcatctttacgaatcatccttcactttaagtgtgggaaagatgcaccctccaggtaacctgtaaggctgtcctaccacctctcgtcctcctgtgacttgagattggggtgcacatgtcacatgagcttgcaaggaggcaggctagtgggtgaggcctcaggatcacagtgccagtgctgggcaggcagcgggggagggcaggagggctgtgggggtcacccagttgctattgcctctgatgatccccagtccacagtcactcccacctattcactccagggccactagctgtggacctgggaagtttgatcttcacatgagaattcgggtgtgcctggaagctgggacagaaagggagctccgtgcatagctctggccaggcccatccagcccccatgtgtcctccctctcccctttatccacccatctagaggtactggtgccttctcagtgccaggcccagtgctgggtacgggatgctgagtaggggacagggagtcctgtgtgagaggccggcaccctctccccctcctgtccccaggagcaaggaagaaatgctgtcctggatcctcaggatcaacctggtggcagccatcttctctgccccggccttcccagccgctgtcagctccatgaagaagttctgtcggcccctgctgccctcctgcaccacccgcctctgccaggtacatgttcctgggtcaacattttgcctccccaggctgccatcctcagcccaggcccccatccagcagccccaccccagctctgtctctaggctgggtgatcctgggctgaaggacaccagagaaggacacctgttccctccatcccaagcaccccacccccacatcaacagggagaccgaggcatggcacacaggggccacagctgtggcaggtggcatggagctgcctctatgccagtgcatccctgtggatgtgaccgagagttggtggccttgtgtgcacctgggcacaaatgcaagagaccgtgtgtcacagggagcttgcacaggtgacacctggctgacgcttcatccagtgctcttttgctgctctcacctattcttaaatgttttatttgtaatcctagaaaacccaacacacccatgctgcaggttctcagggcttctttggagaggacaggagaaatggtggcccggagcttgagaggtagagggcagcggaagccccacacttcctctttgccagcggcctttcccactaggccttgtcccgggtcaccccactgagctcctgggctcctgcttctgcccagaacctttgtgcaatgcacgtacaccatgtatgtgcacaaaccatacacattcacatgtgtaaacacacaggtggtgactcatacacacatgcatgcatgtgcacacagcaccagggggcctggctggcctgtagtgggtgggatgtgtgcgtttgcccatcagcgacagtgtctccgcctgtctttgggtgtgatcctgggtctgcaaccattacgtgtatctgcgcatgaatgtaagagaacgcgtgtatcatatggagcaggggatagcggggccaggctggccttggtccggggtgtttgtgtgtgcacatgggagtgcatatgagctgggttttgtgtgggggtcattgtgtgtctgtgtcagggactgtctatgtgcacatataagtgtgagcatctcttgtctcccaagcctgcggtggggtggctggggggcatcgaggaaagctgatgctgatgggacctgggggaggaggaagggaggtgggaggaagagcatgccctcaggtccagagtctggctctgtccccacattttggtgatgctggctaggccttcatttccctttggtggagcagctcctggtagaacaggatttgagccactccgtgacatcctgagagtaaggcctcacagtccaggatttgtctttgcaggaggagcaactgcggtctcatgagaataagttgaggcagctgactgcggagctggccgaacacaggtgtcacccagtcgagaggggcatcaagtccaaggaggccgaggagtaccggttgaaggagcactatctcaccttcgaggtgagccttgggggactggattgcaaagcccagtgccctgctctttctccttcctgcctggcctgatgtgggactggggaggtgaagcctagtgataaaggggctcattgatgtgggagctgggagggaacagggtcccctgacctttagtccccagtccttccagagtgccagccttccctgacagcagtgaggggcagaagctcagatgaaggccctcagatgctgccaaaccttcctcttaaatgtttgtgccaatttctaacccctttaataatttgtgaatgtacttatttctccatgccctcaccagcactgggcattgcaaaacgttttaatcttcactaacctgataggtttaacaattagtatctcattactattttttttttttttttgagatggaatctcactctgtcgcccaggctggagtacagtggcacgatcttggctcactataatctctgcctcctgggttcaagcaattctcctgcctcagcctcccgaacaactgggattacaggcacatgccaccatgcctggctaatttttgtatttttagtagatatgggggtttcaccatgttggccaggatggtctcgaactcctgacttcaggtgatccacctgcctcggcctcccaaagtgctgggattacaggtgtgagccaccacgcccggcctcattactattttaatttggattttaaaacattttaattgcagtaagacatgtaatataaaatttaccatcttcaccatttttaagtgtatagttcagtagtgttaagtctattcacattgttgtgtaaccaatctccacaattctttcctcttcccaaactgaaactctgtacacattaaataataacttcccattctcccctccctccagcccctgacaatcaccattctactctctgcctctatgattttgactactctaagtggaatcctacagaattcatctttttgtgattgaattattttacttagcataatgtccttaaggttcatccatgttgtagcgtgtgtcagaatttcctttctttttaacccatttatgtcagagtttgcaaatttttttttggtgaaaaatcagaccttggagatgaccttgagcagtatgatataaataactcccatgaacttaatgtcccaataatggaacactaggcataaatgggataaggctgaataatattccattgtatgtacacaccacattttgtttatccgtttatccatcaatgaacacttggcttacttccatcttttggctattatgaaaaatgctgttatgaaaatgggtatacaaatatcccttcaagaccctgctttcaactcttttgggtttatagttagaaatggtcttgctggatcatgtggtaattttatttttaacttttcgataaaccaccagctttccataacagctgctccatttacattcccaccagcagggcacaagggttctgtctatttctccatatcctcaccaacatgtattttctgctctttcgatagtagtaagagtgtgaattgatatctcattgtgacttgcatttctctaatgactaatgatgttgagcatcttttcatgtgcttgttggccgtttgtatgctttctttggagaaatgtaaattcaagtcgtttgcccatttaaaaattttgggttgtcttctgttgttgcattctgagagttctttatatattctggatacaagacccttatcagatatatgacttgcaaatatttttctcccattctgtaggttgccttttcattctgttgattgtatcctgtgatgtacagaagttttcaattttgatatagtcccatttgtgtatttttacttttgttgcctgggtttttggtgtcatatacaagaaatcattgccaattatttggatttttcaaattatgaatgaagtttatgtgcatgtcccttgtttattttttaattggactgttcatcttctttttaatgatttgtgaaagctctctgcatattaaggaaattagtcttttgtcatataaggtgcacatacttttttcctattttgttgtcttttgaccttgtgtttggcctttccccagaaaagccgttatgagacctatatccacctcctggctatgaaaatcaaagtgggctcagatgatctggagcggattgaggcccggctggccactctggaaggggatgacccttctctccggaagacacattcaagccctgccctcagccagggccatgtgactggcagcaaaaccacaaaggatgccactgggcctgatacttagctgacatggatttgcagaccccagggtgggcagatgtctccagtggggtcagtgagcacaattccagccaggggccacttggaccaagctccagtcagttgatgggcagctagaggggtgcagaaagcctgtgggcccaggagatggagatgccgtttgtggcgttgatctccttgcgtccttgggcatctccgggcatcagaccctctccctggcccttgttttcctctccaccatggagcctcattttgtaggccagttgtgtgcatgctctagacaccacctcgctggagaagctggaagggctgttgtcttcccaggtctttctcttctcatcaagctcctctcctcatcttttttgtgtgtgagggcaggtcttgactctaggtctcagctggaaccccaccctttctcctcctccttcctctgagttgaccagcagcaggtctgccgaccaccagcaccatcctctcctcccagcagcctccagaaccatgcccaggtctcctgcctcacatcacaataatctgggacccaggcttgtgccctttcagtgtaaagctgactccatcacatgtgcatccacttcttttcatccattgagatcacactgcctcctttttatacagacacaaatatacatctataagaataatatatacataaggaacccctgaaagatggttttggaactggaatcagttagaggatgaaatcagataaaggaaaagcctattttggagcttcccctgttaggaaggatggctgcacctggccccctggcattcctgacgctctaggagggaagggggaggcagtgctggcctcccttgccctgtttttccctcttccagctgacctgtgacttatactgctcttaccgatgatacttttggaaaaaatagagcgtgtatgcaccgccccgtttgtcccatggatatcctggggtgtgagtcggatgggaccacggccctgtttatatttgggtctttatgttggtgctgccaggtctctgagctccagaggtggcctcttggacagatctactgctataggaataaaagacactctgtctcgcaaatggctgcttgtcaacaagcccaaagatgcttgtcggaggacggttatggaagcccttaattcttggttgtgggaaaaggtggaatgacaagttattgattgtttttctgtcgctatttctttcatttgtctagtgaatcagaaaggcttagccaaggccacatctgggaagagtggagaaatttgccacttgacgatcacggattagctagcacctttaagccctgcatttctccaactgacaagtgggtgggggtgatggcacattcagtgtggctatgaagagcgaatcctctctattgtttaaatagattactgtagtttggccaggaatttggcgtcagtggtaacacacttagttaataaaataagccaggcttgcaactaagtatctaactttacaggcccactcacatttgaggcaaggggctattgagtatgtggagagatgtagtgatttaaattcagattatttaagttggatcagctgaagtgtgttttagacccaaaccatctggccccttcgttttgctcagaggaagtaaatgttcacttaaatgaaattgaaaacgccatgtggcaccacaaaagagctctctgtactttccccatgctgcctcaaaagttctgtgagtttcggggtcagtgtcccacccttcacttcccgagggcgggtgagtggagagcagagccaggagctctggcagctgtggacagatgtgcttcctgagcatgggttgtgcctcccatcagtaaaaaaatgtttagttcacttccttaattgtataattatttatttgtaaattatatacatgtactactgtactaaaatattatgtacattataaaacatacacaaaaatagaaatttaaaaaagatgagatgaaaataaatctaagtcaaagttctaatagttcttcctgcattcgaatggatcctcaccacccacaactgctgcctccaacatgcccattttctaggactgttcaaattcaggactggtgacatgcaataagtggtttgcgccacctggtggtcctgggaagtggcctcgggctcagggacttctgggggttgccccttgaggacggtgtctcttgcgccttcatcctctcattcaatgagggccaactgtgtgctgcacgctgggcggggtgatggggatacggtggtgggaggaagtttggctgcctgtcctcgtggggctcacagtttcgtgaggagaagaacaggcagttaccattaccacttgggcctctgggaggggctggaaagagaagccaaaaaatgacctggaagagaaaagaaagaactgggaaagtggggatgaagcctctgacttgcgaagctgcctgaatgtcgtcctacgtgttccagcgacggggcggtggtagggaagtagcttgacaggactgcgactcttcctgaaaggccactgggaaggcttccccaggcagaggtttgagaggcagagtggagaaggggcctctctggccacatgtgttcccgggtcctaatcatacctgtgaaatgaatgggtggatgacaggtgaggaaagaactctgttaggttctggccttggactctccgcacatatggcaggtactgtaggattcaaagcatataatgaaggtacccgatgctcatgcaaagatcggtgagttcaccaagaggtcattcagaatcaaccgagggccacatagagattggtgggttcattgggtggcttctgactctaaaatttagaaagcaacagcaacctagagcccccagaaaggtcacacgaggacaataagctggaccacacaaaggtcaatgggttccccaagagttcatatggagttaatttgggatcctacagaagccacaagtcacagagaagaataactggctctcagagaattttaaagtcaactacgaaaccagagacagcagaggggcctggatgagatcaacagaagggggccgggaggggccagtgagttgcaggtttatgcaggattgagttcattattttcctttttaaaattttttgtagcagatactttttcccagcacccccacaataaatacaataactttaatttgttctttatttttttccatcgactccctctcatctagtttttgtcactctggctgtgtgatacaaggatgcaaggcacaggatattgtcatcaccaccatcaaatcagccatgtaataggcatctatcacgtgccagcatcagcactgggtactttataatctccacagcaaccttttggaataggtatttacatcacccatttcccagcaaggaaactgtggcctagagacgtcacacagctaggcggcacagagctggaatttgaacttacgccctgttgatgccaaagccctctcaacccgcagcctctctgtccctcccacctataggtctctgactacacacatcctagtgggattcacacacacacacacacacacacacacacgtgtagccgagtgtgcatgccaaccacctcagctgtttgggtggaagacgtccgtgtgtctggctggaaccgaatagttccgggtgctgggcactggtttactaaattagttgatgaggggaaaggcttttgaacctgggcctccatctgccttctccatactgaaatcatgtactctctctcaggtctgcgggtttagacaggtcctggctctgagggggtataaagttggggaaagagcaacaccctgtgggcttatgaactgcagcagctgtggtcctggcagctgagggtaccactgttatgccactttgcatgttcagactttgcctgtgacgtgcctcagggtccaagggtcatcctgccttggctgtgctattaccaaccccacaacccatccctcctcacccacctaggccggcaactgttgcctcagtccggcccatagatccagggcaggaactgggccagagttccaacgctgagtttgaagcagagcaatttgtgtcagtcccttggccaggttccccagcagccagtggggacaccttgtaaatattcttggaagcgggaggagggctggagtctgtcctgtgagctggggccggagagaccggagacagggtcacttccttccagggactgccctggccccctccaacctccaggccagcatcatccacatccaccatgggacttcgtgctctgagttccctcctcatctgaggctaggcacacacagtcaaacaggagttatttctgattttatttataatataaaaatgttcaagtgtcaacagtcaggtgttcagacatttcaggacaggattcccatctgtttctgtttgggattttttttttttttaaacaattacctttttgacaaattagcagtggacccagtttttgggggtgggagggcaggactggagacgagtggatgtcataggtgggttgggggctaggaggcagcctgtgagaaggaaatggtgttactttattgctaaaaggggaatacactgtcgagtggctcttctcggtcccagcgtgaccatgcatccaatctaaagaatctgaaatgcaaaggacatgcaggtgtaaaatagaaaagacgacctgtaaacgaaggtgctgcagaggacggaggggcgtcctggaggctgtgggggacaggagccgccaacattgggcccctggcagagctgccacctccctgggctcaggctcttggggaaacgtttctctgccccccctcctttaacagctgtgagtagccagggcttccccattcgggtagctgtgtctttatctccccctggaagttaccccagctccagctccaagcctagggtcctggccctctcctcccaggggtcgggaacttcagctcttgcctgggagcaaagctacttccgtcctcagttcttccttagggccaaccccccaccgccccccaccctcgcccccaacagaacccgcacctcttctctcccagctgtcactctcagcaccccacaacccagacctgtcccccggagccccagatgagcatacagcaaaaggcaccacaaaataggtttctattaaagagtcaaaaaattggcccatctctcttttttttttgttgtttcttttttttttccgaagctgtaaatcaggatgttacatataaatagtttccctataaaaacgcctttgccgttagctagtattataagacaatttttgctaaaatgaaaataaaacattttgttatacttttttccttttatagaaaataaaaatatttttatttcttttttcctcctttctctccagtaggcggtctctggtctccttaaagatagtggggcgggcggggcggaggggcgcgcggcggggccctagagtggcgccgagtcctgcttggcccgcgggggcggcccgcggctgtgtctgctgctggcccgcgtgctgtggctgtccagtgagtagtaagtcctgctgtcggccgccgggcacagtggcggcgagtccgagcgcagcgcgtcgtgcgccccacgcaggcccaggaaaggtgtgctctcggccgccagcgccccgtccgcgtcgtccgcgtcgtcgtccgacgccgaggctgagccgccgcccgagccgctgctcagcgacagcgagtccctcgccgcccgtgcgcgctgcgccggcagcccgttgaggcgcgagcggcgccagcgccggggccccgccgacgtcctgcgggacgcaccgtgcgcgcgcggccgcggcggcggcgggggcgcgcactcctgcgtggtctcgtactcgtcgtcctcggggatgcggaaggggctggcaggcatgctgcccaggctggcgccgagcgccaggtcccggccgcggtccgggcccgcgcggggtaatatagtgtcatattggctgttgttgcgcgggccggccggccggctggnnnnnnnnnnnnnnnnnnnntttttgttgtgttgttttgttttattttttctgttcttttgtgtctttctcctttcttgctctgtttttctctttctcttctttttcttctgttttctttgttgtgtctttatttccgttgttgtctctttttggctttgctttgtctctgtctctccttcttttcttcttctttttttgctttttttttctttttctctttttccttcttttttttttgtttttcttgttttacctgtgttgttttctttccgtcttctttgctttctcttgttctgtcttttctttttcttggtttttctcctcttctcttgtcgctatctttgttgttctgtctgttgcgtgttgttcttctttctctccctcgtttctttctctctctcgcctcgtgtcttcctccctcctgctcttgtgtcgtcgctcgcgttgctttcttcgtgtgctcttcttctccgttccgcctcgttcttctctctctgttcttgctgttctccgtcgtgctctttctttttgttttgttttttttttttttttttttttttttttttgtttttttttttttttttttttttttttttttttttgttttttttttttttgttgtggtcggtacccagacttgcttttaaccttgcccgagaccccgcctgcaagaatgacggcagcaaccctcagtggccttatgcaatttcctaaacctctccgagcctcggtttccttatctgttacgcgggcataaccatggtgttgattccatagctctgttgggatgattccagattgtatcagtgggatgtgttagccctgtgcctgaccctggtaagctttcatgaatggtcacttgctgtgggaatgctcaccgtcagggggtcaggctcacgctggggtacatgttccatctggtttaataccgcagctctgtaagacccttccgccagtcccattctacacgcaggaaagtaacactcagaacgtttaattctacacgcaggaaagtaacactcagaacgtttaagtgacttattcaggatttacacagccaagaagtggcagagctgggatgtgacttgaggctagtcaggaaccaggactcatactgcccaattccagaagccattagtctccattcagatacccctgtgacctggcctcactgccccacagggacaattcctcccatgccctgatggcttcagtgagggaaatattcctccttacagtgaagtcaaaacctgcttcaggggagtaccaagatcccatgaggtgtctctgcttgtggctacagacccatccccacaccaccagctccttcagaagtctggccttgctaatatctcccaggctggatcccgggtacctgtccccttttgtgctccacatcccccttgtaagcccatcagtcttctgccccaccgttgtcacctcaggacaggggccacccacctccacgcttcccttccaaactgcacagctgggcatctcactgctctctggaaccagcctggagtccccattatcattttttctgaatcgcctgactcctccctcttccctttcccaccggcacatctgattaaccaccaagtcctacccattcccttctccggaagcacactctccaccccatcctgggcccgactgttcacatgtggtcatctgggtccaccccagggtctctcctccttcactctatgcagttcccagagcaatcttgtaaagtcacagctctgctgaagccggtcttcctgtttacccacccagggtcagtctgtctggcctcagcttgcctgttcaggcccagctcctctgctccctacagcccactctgttccaggcacctcactcatcagccctgttcttaagtgcctctgttggaacagctcaagttgttccccgtgcctagaatgcttttcttcctgctctcctgcctctccccttcctaccacccattaaggagtctcattgctgtggttacgattcataaatagctacacctagtgagcatcagctccatgccagggatgagacaaagagctctgtgcacatgatctcaggtggccttcacttgaaccatgcatagtagcttttgttctccctgttctacagctgagggaacaaggtacagaggtgatcagtctgccccaaatcacacaggtggtggagctgggcttagaaaatctggctacttcccagagcctacagtcagactgggtctctctgccctggtgtggtgtcatgtttagcaccttccataggctgctgtaagcttccttggtttgtttctgtggctaggagctcctcaggagcaggaacctggcaggccacttctggattcccagccaggcctgcccagcacagggcctggcatggagtaggctgagttgagagcaagggaatatctgctcctctccctgctccctggtgtggagtttttagtaccactcatctttccctgctcacctcctacagaccccacttgctgagggccactcagggctgagcaaggtggcaggggtgctggcccttgacttctggcttggagtcagggaagaaagggcgtttcctggttcttactacatccactgcttaggaagccaacaaggccttgaaccctggggtcttgttgctgctactgccaaggcctgccatcattcttggctcacgtccatcttgtgctggtcagtgtcctcaaaggcaacctcccctcccactctgcagtttactccttcttcgtgtctccttctgttcctgctgggacatggaacttctagcatgtatcctggtttgtccagaacagcccctgtttgttctttttttttttttctttttgtaaagggagtcttgctctgttgctgaggttggagtgcagtggcgccatctcagctcactgcaacctccgcctcccaggtgaagggatgctcttgcctcagcctcccaagtagctgtgattacaggcatgtgccaccatgcctggctaatttttgtatttttagtaaagatgggggtttcaccatgttggccagactagtctcaaactcctgacctcaggtgatccatccgccttggcctcccaagtgctgggattacaggtgtgagccaccgcgcccggctgcctgtttgttcttgatgttccagtgtaactattaataatgtcctttttctagtgtgaaaagtgtcctgggaggacaattaaattagatggtcactgtccaccagggtccactggcccaactctagtcccagtctgtcattaacatgccgatggctctgagcaggccatttcaccttttctaggaccttgttttcccatatgaaaaatggagatgaggctctttggagtgtttctgaggggccctaagggtcagccttgggccagtggtgccagccctctggctaagcggggaataggtcagggggtaggaactgacctctcgctgtgtggggagtcgcgaagggagtccacggaatcgtgatagggtggcgcggtggccctgcgccgctcctccaggttgtaggctgctgcccgccttgcccgggcctccacacatgctgggctgttgcatttgctggtacccactgatgatagcatgatccccgactgggagtcagaagtcaggctctcagaacgttccaggctccacgtgtggctctcgtgtctgggaaggccagatggggtgagacgaggggtcaggaaggggcagggcggcccagcaggtgtggtcccatggacctccctggctcttcttccacctcgagctcccttagctcaatgcccttctccactctggggtgatgtgtattgttgcaaatgcccaaccccaatattggaagaaggagggctggggtcccatagatgggtgagctgtaatgtgcagagacccatttctttccttcctgcaaccagcctccccccagccttaccttagaccccctgtctgggacctttccaccaccgtggtccttagctacctatctcagaagcccagccccaggggccagtatgtgagggccctgactatttcctggtgctcccgagggaagaagggagccagccatgttatttttgagttgtctgagcctttgtgctgtgtggactggcctctgcagttctggagaggaggctaaggtgtgctgtgattcctgtggcaagctcaggggagggtattgaatagctctggatgtcggagtaagtgggcactttgcgccagatgaagtatgtgagtctacaagtttccatgggccttggtggtgcctacctgtggctggaggtgggtgtggctgtggagcagtggtgagaaggagaacaggagtggctcccagagaaggtggtctcagtttctctcctgatgacatggtctgtggctggcacgttcttggaaatatactggaacagacagagttgggcgagagttagtgactggggcccaaatgaactctttcttgttggggacagggaagtgatgagcactgactgagctcctggttggggagacccactgtgtgagagtgacttgatgttggggcagcgatggctccagcaaatcaacccccaccccttcctcatggaagtgagcaaaccaaggccagccatcctggtgaggcagtgcctagcaggcaaggctggccatgggataggctggctgctgccctggcccatccttgcagggggcatgagaaggctggctgtccactgagggctcagaagggggccccaggaaagccactcacatctgccatctggatctcctctgggtccagccgggggtggctgggcccattggccaagctccggttctgatgggccgggcacatgttctgccggaggtggttgtgcatctgcttccgctgttttctgcacaagggaagggaaggtgaggctggcattccccccactcgccaacgatgaacttccctagctatctctctagggaaacagcttttcctcctgcccagggtggccatggctactgctcgtccctgtactcaagctgccctacagcatcactaccacctgaatccaataggacctgagcgtcgtggcagtgagctctggctctgcccagagagtagaacttcactgctttctagctatgcaaccccgggcaagttacttaagctcttcacgtttcactttcctcatctataagacagggtgatcatttatccattccaaagactattgaggattaaaagtatatgaaacattcaagcacagtgctgactccctctctctctccctcattcattaatttggtatgtattgagttatcactatgtgccagacactgttttggagcagagacaatagataggtagatagggaatccaccctcctgaagcctgcaggccagtagaggaagcagatggtaaacacataaacaaagcaatgaactagatactttcaataaagttccatgaagaaaataaaacaggtgctgtggctagggagtcagggcctgtgggactacttcagattggcacatattaaatgctcgatttatttgatattaaatctaatcatgtccctcccctgtttaagacccttcattgtgaactcacggagatagagagtagaaggatggttaccagaggctgggaaaggaagtggggggttgggagggaggtggggatggttcatgggtacaaaaactagttagaaggaaaaagacctagtattcaatagcatatggggtgactatagtcaataataatttaattatacatttaaaagagtataactggattgcttgtaacacaaaggtccacgaggacccatcagtttgctcaaggtcacaaaggataaatgcctggggggatgaatagaatacatgatatgattattatgcattgcatgtctgtatcaaaatatctcatgtaccccataaatatatacacctactaagtacccgcaaaaatgaaaataaaacccctttattgggccttagtgtcctgtttctctcccagccctgtctctctctgcccacccagcaccccagctagctgcctccatggtgagcttgtttctgatcccccactatgcccagccctctctggcctcccggcctttgcgcatgccaggccattcacctggaatactttctctcctcttcacctgctaactcttgttcacctctcaggccctggcctaaatgctgcttcctcagggaaacccttcctgctcctcagccaaggttaggtgactctaaaaggtgtcccgtgacactggaccacttgttcagagcaccggccgtatgcctgaggcaggacctggtgtccagcaggcactgaatgtttgttgaagaaatgagtaaatgcagtgggggcaggacaggcggcttgctttttctcca

SEQ ID NO: 329 - DNA, 4169 bp, Homo sapiens
ctcgctcagcctctccacatcgcggctccggcacctgaagggacgcgggcgggcgcgggcagctccgaccggcggcggcggggcgggacaggcagcccggcggcctccgatggccccgccgtgagaggccggacccgcggcggggaccagcagcggtctagaggagtcccaggagcagccaggacaggcggaagcagtggctgccatggaggaggacaagctcttatctgcagtgcctgaggaaggcgatgccacccgtgaccccggtccagagcctgaagaggagccaggggtccggaatgggatggccagtgagggcctgaacagcagcctctgcagcccagggcacgagcgaaggggcaccccagcggacactgaggaacccacgaaggacccagatgtggccttccatggcctcagccttggcctctctctcaccaatggcctagccctggggccagacttgaacattctggaagattcagcggagtccaggccctggagggctggcgtgctggcagagggggacaatgcttccaggagcctctacccagatgctgaggaccctcagctggggttggatggtcccggggagccagatgtgcgggatggcttcagcgccacgtttgagaagattctggagtcagagctgctgcggggcacccagtacagcagcctcgactccctagacgggctgagcctcacggatgagagcgacagctgcgtcagcttcgaggcccccctcacacccctcatccagcagcgggcccgtgacagccctgagccaggggctgggttgggcattggggacatggcgtttgagggggacatgggggcagctggtggtgatggggagctgggcagccccctgcggcgctccatctccagcagccgctctgagaatgtcctgagccgcctgtctctcatggccatgcccaatggattccatgaagatggccctcagggcccagggggggatgaggatgatgatgaggaggacacggacaagttgctgaactcagccagtgaccccagcctgaaggatggcctgtcagactcagactctgagctcagcagctcggaggggttggagcctggtagtgcagaccctctggccaacgggtgccagggggtcagtgaagctgctcatcggctggcacgccgtctctaccacctcgagggcttccagcgctgtgatgtggcccggcagctgggcaagaacaacgagtttagcaggctggtggccggggagtacctcagtttcttcgacttctcgggcttgactctggacggagcactcagaacattcttgaaggccttcccgctgatgggggagacacaagagcgtgagcgggtcctcacacacttctcccgccggtactgccagtgcaaccctgatgacagcacttcggaagatgggatccacacgctcacctgtgccctgatgctgctcaacacggacctgcacggccacaacattggcaaaaagatgtcctgtcagcaattcattgccaacttggaccagctgaatgatggccaagactttgccaaagacctgctgaagaccctttacaactccatcaagaatgaaaagctggaatgggccattgatgaggatgagctgaggaaatccctgtctgagctggtggatgacaagttcgggacaggcacgaagaaggtgacgcgaatcctggatggtggcaaccccttcctggatgtcccacaggcgctcagtgccaccacctacaagcacggcgtcctgacccggaagactcacgctgacatggatggcaagaggacgccccgtgggaggcgtggctggaagaaattctacgcagtgctcaaagggaccatcctgtacctgcagaaggatgagtacaggcctgacaaagctctatcggagggtgacctgaagaacgccattcgcgtgcatcacgctctggccaccagggcctctgactacagcaagaagtccaacgtgctgaagcttaagacagccgactggagggtattcctcttccaggcaccgagcaaggaagaaatgctgtcctggatcctcaggatcaacctggtggcagccatcttctctgccccggccttcccagccgctgtcagctccatgaagaagttctgtcggcccctgctgccctcctgcaccacccgcctctgccaggaggagcaactgcggtctcatgagaataagttgaggcagctgactgcggagctggccgaacacaggtgtcacccagtcgagaggggcatcaagtccaaggaggccgaggagtaccggttgaaggagcactatctcaccttcgagaaaagccgttatgagacctatatccacctcctggctatgaaaatcaaagtgggctcagatgatctggagcggattgaggcccggctggccactctggaaggggatgacccttctctccggaagacacattcaagccctgccctcagccagggccatgtgactggcagcaaaaccacaaaggatgccactgggcctgatacttagctgacatggatttgcagaccccagggtgggcagatgtctccagtggggtcagtgagcacaattccagccaggggccacttggaccaagctccagtcagttgatgggcagctagaggggtgcagaaagcctgtgggcccaggagatggagatgccgtttgtggcgttgatctccttgcgtccttgggcatctccgggcatcagaccctctccctggcccttgttttcctctccaccatggagcctcattttgtaggccagttgtgtgcatgctctagacaccacctcgctggagaagctggaagggctgttgtcttcccaggtctttctcttctcatcaagctcctctcctcatcttttttgtgtgtgagggcaggtcttgactctaggtctcagctggaaccccaccctttctcctcctccttcctctgagttgaccagcagcaggtctgccgaccaccagcaccatcctctcctcccagcagcctccagaaccatgcccaggtctcctgcctcacatcacaataatctgggacccaggcttgtgccctttcagtgtaaagctgactccatcacatgtgcatccacttcttttcatccattgagatcacactgcctcctttttatacagacacaaatatacatctataagaataatatatacataaggaacccctgaaagatggttttggaactggaatcagttagaggatgaaatcagataaaggaaaagcctattttggagcttcccctgttaggaaggatggctgcacctggccccctggcattcctgacgctctaggagggaagggggaggcagtgctggcctcccttgccctgtttttccctcttccagctgacctgtgacttatactgctcttaccgatgatacttttggaaaaaatagagcgtgtatgcaccgccccgtttgtcccatggatatcctggggtgtgagtcggatgggaccacggccctgtttatatttgggtctttatgttggtgctgccaggtctctgagctccagaggtggcctcttggacagatctactgctataggaataaaagacactctgtctcgcaaatggctgcttgtcaacaagcccaaagatgcttgtcggaggacggttatggaagcccttaattcttggttgtgggaaaaggtggaatgacaagttattgattgtttttctgtcgctatttctttcatttgtctagtgaatcagaaaggcttagccaaggccacatctgggaagagtggagaaatttgccacttgacgatcacggattagctagcacctttaagccctgcatttctccaactgacaagtgggtgggggtgatggcacattcagtgtggctatgaagagcgaatcctctctattgtttaaatagattactgtagtttggccaggaatttggcgtcagtggtaacacacttagttaataaaataagccaggcttgcaactaagtatctaactttacaggcccactcacatttgaggcaaggggctattgagtatgtggagagatgtagtgatttaaattcagattatttaagttggatcagctgaaaaaagagctctctgtactttccccatgctgcctcaaaagttctgtgagtttcggggtcagtgtcccacccttcact

SEQ ID NO: 330 - protein, 763 aa, Homo sapiens
MEEDKLLSAVPEEGDATRDPGPEPEEEPGVRNGMASEQSSLCSPGHERRGTPADTEEPTKDPDVAFHGLSLGLSLTNGLALGPDLNIDSAESRPWRAGVLAEGDNASRSLYPDAEDPQLGLDGPGEPDVRDGFSATFEKISELLRGTQYSSLDSLDGLSLTDESDSCVSFEAPLTPLIQQRARDSPEPGAGLGIGDMAFEGDMGAAGGDGELGSPLRRSISSSRSENVLSRLSLMAMPNGFHEDGPQGPGGDEDDDEEDTDKLLNSASDPSLKDGLSDSDSELSSSEGLEPGSADPLANGCQGVSEAAHRLARRLYHLEGFQRCDVARQLGKNNEFSRLVAGEYLSFFDFSGLTLDGALRTFLKAFPLMGETQERERVLTHFSRRYCQCNPDDSTSEDGIHTLTCALMLLNTDLHGHNIGKKMSCQQFIANLDQLNDGQDFAKDLLKTLYNSIKNEKLEWAIDEDELRKSLSELVDDKFGTGTKKVTRILDGGNPFLDVPQALSATTYKHGVLTRKTHADMDGKRTPRGRRGWKKFYAVLKGTILYLQKDEYRPDKALSEGDLKNAIRVHHATRASDYSKKSNVLKLKTADWRVFLFQAPSKEEMLSWILRINLVAAIFSAPAFPAAVSSMKKFCRPLLPSCTTRLCQEEQLRSHENKLRQLTAELAEHRCHPVERGIKSKEAEEYRLKEHYLTFEKSRYETYIHLLAMKIKVGSDDLERIEARLATLEGDDPSLRKTHSSPALSQGHVTGSKTTKDATGPDT

SEQ ID NO: 331 - DNA, 4896 bp, Homo sapiens
ctcgctcagcctctccacatcgcggctccggcacctgaagggacgcgggcgggcgcgggcagctccgaccggcggcggcggggcgggacaggcagcccggcggcctccgatggccccgccgtgagaggccggacccgcggcggggaccagcagcggtctagaggagtcccaggagcagccaggacaggcggaagcagtggctgccatggaggaggacaagctcttatctgcagtgcctgaggaaggcgatgccacccgtgaccccggtccagagcctgaagaggagccaggggtccggaatgggatggccagtgagggcctgaacagcagcctctgcagcccagggcacgagcgaaggggcaccccagcggacactgaggaacccacgaaggacccagatgtggccttccatggcctcagccttggcctctctctcaccaatggcctagccctggggccagacttgaacattctggaagattcagcggagtccaggccctggagggctggcgtgctggcagagggggacaatgcttccaggagcctctacccagatgctgaggaccctcagctggggttggatggtcccggggagccagatgtgcgggatggcttcagcgccacgtttgagaagattctggagtcagagctgctgcggggcacccagtacagcagcctcgactccctagacgggctgagcctcacggatgagagcgacagctgcgtcagcttcgaggcccccctcacacccctcatccagcagcgggcccgtgacagccctgagccaggggctgggttgggcattggggacatggcgtttgagggggacatgggggcagctggtggtgatggggagctgggcagccccctgcggcgctccatctccagcagccgctctgagaatgtcctgagccgcctgtctctcatggccatgcccaatggattccatgaagatggccctcagggcccagggggggatgaggatgatgatgaggaggacacggacaagttgctgaactcagccagtgaccccagcctgaaggatggcctgtcagactcagactctgagctcagcagctcggaggggttggagcctggtagtgcagaccctctggccaacgggtgccagggggtcagtgaagctgctcatcggctggcacgccgtctctaccacctcgagggcttccagcgctgtgatgtggcccggcagctgggcaagaacaacgagtttagcaggctggtggccggggagtacctcagtttcttcgacttctcgggcttgactctggacggagcactcagaacattcttgaaggccttcccgctgatgggggagacacaagagcgtgagcgggtcctcacacacttctcccgccggtactgccagtgcaaccctgatgacagcacttcggaagatgggatccacacgctcacctgtgccctgatgctgctcaacacggacctgcacggccacaacattggcaaaaagatgtcctgtcagcaattcattgccaacttggaccagctgaatgatggccaagactttgccaaagacctgctgaagaccctttacaactccatcaagaatgaaaagctggaatgggccattgatgaggatgagctgaggaaatccctgtctgagctggtggatgacaagttcgggacaggcacgaagaaggtgacgcgaatcctggatggtggcaaccccttcctggatgtcccacaggcgctcagtgccaccacctacaagcacggcgtcctgacccggaagactcacgctgacatggatggcaagaggacgccccgtgggaggcgtggctggaagaaattctacgcagtgctcaaagggaccatcctgtacctgcagaaggatgagtacaggcctgacaaagctctatcggagggtgacctgaagaacgccattcgcgtgcatcacgctctggccaccagggcctctgactacagcaagaagtccaacgtgctgaagcttaagacagccgactggagggtattcctcttccaggcaccgagcaaggaagaaatgctgtcctggatcctcaggatcaacctggtggcagccatcttctctgccccggccttcccagccgctgtcagctccatgaagaagttctgtcggcccctgctgccctcctgcaccacccgcctctgccaggaggagcaactgcggtctcatgagaataagttgaggcagctgactgcggagctggccgaacacaggtgtcacccagtcgagaggggcatcaagtccaaggaggccgaggagtaccggttgaaggagcactatctcaccttcgagaaaagccgttatgagacctatatccacctcctggctatgaaaatcaaagtgggctcagatgatctggagcggattgaggcccggctggccactctggaaggggatgacccttctctccggaagacacattcaagccctgccctcagccagggccatgtgactggcagcaaaaccacaaaggatgccactgggcctgatacttagctgacatggatttgcagaccccagggtgggcagatgtctccagtggggtcagtgagcacaattccagccaggggccacttggaccaagctccagtcagttgatgggcagctagaggggtgcagaaagcctgtgggcccaggagatggagatgccgtttgtggcgttgatctccttgcgtccttgggcatctccgggcatcagaccctctccctggcccttgttttcctctccaccatggagcctcattttgtaggccagttgtgtgcatgctctagacaccacctcgctggagaagctggaagggctgttgtcttcccaggtctttctcttctcatcaagctcctctcctcatcttttttgtgtgtgagggcaggtcttgactctaggtctcagctggaaccccaccctttctcctcctccttcctctgagttgaccagcagcaggtctgccgaccaccagcaccatcctctcctcccagcagcctccagaaccatgcccaggtctcctgcctcacatcacaataatctgggacccaggcttgtgccctttcagtgtaaagctgactccatcacatgtgcatccacttcttttcatccattgagatcacactgcctcctttttatacagacacaaatatacatctataagaataatatatacataaggaacccctgaaagatggttttggaactggaatcagttagaggatgaaatcagataaaggaaaagcctattttggagcttcccctgttaggaaggatggctgcacctggccccctggcattcctgacgctctaggagggaagggggaggcagtgctggcctcccttgccctgtttttccctcttccagctgacctgtgacttatactgctcttaccgatgatacttttggaaaaaatagagcgtgtatgcaccgccccgtttgtcccatggatatcctggggtgtgagtcggatgggaccacggccctgtttatatttgggtctttatgttggtgctgccaggtctctgagctccagaggtggcctcttggacagatctactgctataggaataaaagacactctgtctcgcaaatggctgcttgtcaacaagcccaaagatgcttgtcggaggacggttatggaagcccttaattcttggttgtgggaaaaggtggaatgacaagttattgattgtttttctgtcgctatttctttcatttgtctagtgaatcagaaaggcttagccaaggccacatctgggaagagtggagaaatttgccacttgacgatcacggattagctagcacctttaagccctgcatttctccaactgacaagtgggtgggggtgatggcacattcagtgtggctatgaagagcgaatcctctctattgtttaaatagattactgtagtttggccaggaatttggcgtcagtggtaacacacttagttaataaaataagccaggcttgcaactaagtatctaactttacaggcccactcacatttgaggcaaggggctattgagtatgtggagagatgtagtgatttaaattcagattatttaagttggatcagctgaagtgtgttttagacccaaaccatctggccccttcgttttgctcagaggaagtaaatgttcacttaaatgaaattgaaaacgccatgtggcaccacaaaagagctctctgtactttccccatgctgcctcaaaagttctgtgagtttcggggtcagtgtcccacccttcacttcccgagggcgggtgagtggagagcagagccaggagctctggcagctgtggacagatgtgcttcctgagcatgggttgtgcctcccatcagtaaaaaaatgtttagttcacttccttaattgtataattatttatttgtaaattatatacatgtactactgtactaaaatattatgtacattataaaacatacacaaaaatagaaatttaaaaaagatgagatgaaaataaatctaagtcaaagttctaatagttcttcctgcattcgaatggatcctcaccacccacaactgctgcctccaacatgcccattttctaggactgttcaaattcaggactggtgacatgcaataagtggtttgcgccacctggtggtcctgggaagtggcctcgggctcagggacttctgggggttgccccttgaggacggtgtctcttgcgccttcatcctctcattcaatgagggccaactgtgtgctgcacgctgggcggggtgatggggatacggtggtgggaggaagtttggctgcctgtcctcgtggggctcacagtttcgtgaggagaagaacaggcagttaccattaccacttgggcctctgggaggggctggaaagagaagccaaaaaatgacct

SEQ ID NO: 332 - protein, 763 aa, Homo sapiens; identical to SEQ ID NO: 330

SEQ ID NO: 333 - DNA, 26563 bp, Mus musculus
gcaggactggtgccctgggtgtgtgagtctttaacaaggaggaaggtctgacgcctgagtctgggaaacctctgcctcctgagggcttaatgacatcctgaaggaaccagagcaggttgtggtaactctgggagggaacgggaaggacataggctcaagaggggctttcaggtcaggacgtgctcacagtgtatgtccatttgcagcccagactcctgggtcagcatctgtcagtcccagggccactcagacctcccaggacctctgatgtccacatgaagaggggacactgtaagtgaaacctccttgcctggcacctggaaggtactgtgagaaatctagtagagcaggtgttgggttcagggtggaagctgagaaaactcatttcagagacaaagcttaaacatgaagctttattttctgagtgctcaggaatgggaatacaaaccagctgttgcattgaccaatcgtattttgacacaaggagttaagcaaggaagttgacattggtgattgggctgggcgtggtggcgcacgcctttaattccagcacttggaaggcagaggcaggtgaatttctgagtttgaggccagcctggtctacagagtgagttccaggacagccagggctacacagagaaactctgtctcaaaaaatcaaaacaaaacaaaacaaaatacacattggtgaccttattctggtcccgtggtttcaaggtcctaagtcagcttttgcagtcaggtcccctcttagatgctggcctggaattttagactaataagggaacaagagaggctgctcatagtcttttttttttttttttttttttagatttatttatttatttattttgtgtatgtgagtacaatgtagctgtacagatggttgtgagccttcatgtggttgttggaaattgaattttaggacctctgctcactctgatcaaccccactcactcagtccctgcttgctccggcccaaagatttatttattattatacataagtacactgtagttgacttcagactcaccagaagagggcatcagatctcattatgggtggttgtgagccaccatgtggttgctgggacttgaactcaagaccttcagaagagcagttagtactcttacccactgagccatctcgccagcccctgcacatagtcttaagtcaaggcaggcagcacatttatgacttgtgtgccttagttagataacgggataactgcatcttccctctttacatccttcactggttaacagacagacacaagaaaggcctgttctaggcctggggacagttctgaccctgccagcaagggggagtttcttcctgaggagctggactcaggaaactgtctccttacccaggcgttaggatcaagtgaggcctaggttcaaatcctagctctgacactctctagctgtgtgagcttgggccaactgcctgctttttccgtgtctcctggtttgttcctcggtgggacacaggtgataaaaagtttacccagttcgcagggctgtgtgaggatgaagtgagacagctgataacctagcgagcaggtattcagtaaatgtgagcttttaaagtactactgcttctgtgtgggtgggtgagtgcatgtgtgtgtgcactcgtgtgcatgtgtgaacacttgacgtctgtgttggtatgcttgcaagtgtatgtgtgtgtacttgtgagtgaggtacctgtgagtgtatgtgagtgtacctgtgaggtcagaggacagcctccagtcttgttcttaggcaccatcctttgtgtgtgtgtgtgtgcatgtgtgtatatatgtatttttgacaggctctctcactggcttggaacttactaagtagactggctgtctgataaaccccaggaatccacatgtttctgcttctccagtgttaatagtccaagcaggcactactactatgtgcttgttttgtgtgtgtgtgtgtgtgtgtgtgtgtgtgtgtgtgtgtgtgtgtgtttcttttaaacataggttttggagattgagctcagggcccagtgcttgcaaaacaatggctctgttgaccgagctatctccccagctggtattattgcttctggatgttagcttggtgtgaagggttcctgcctcttgcaaggcctcctaatagtttgtgctaatggtctgtcttaagaaaggtagagagggctaaggagatggctcggtggttaaaaacactcactgctcttccagaggtcctgagttcaattcccagcagccacatgatggctcacaaccatctgtaatgggatccaatgctctcttctggtgtgtctggtatgtctggtgtgtccggagtacagctacagtgtagtcacataaataaaataaataagtcttaaaaaagaaataaagagagaaagaaaggttggtaacataaacagacatggtgtctgaatccttgcctcccacgtgcccaggaagaagggatacagcttatactgaatggcagctgtgagcattaccttataggcagctgggcccatcgaaaacgtcagaggaggaaaacaaggggagcttggcaatgcagatttttgtccttatagaaatggaatctaagtgtacttacagtataatctgagtccagtgatgtcatcatcacagcagtggaattgtgggagagcctctcctacgctaggcactgtgctaagagcggcacaaaccttgcccgtagtcaccacaccgcaaccttagttaataggttttgtttgtttttactttataaattaggaaacttccggcacaggagtgtttaacttcggtaaaatgtacacagcccccaagtagaagagtgggattagaatatgggcaagctggctttagacagttaacgaggacattctgtgatgtgtgggtctgtgcatatggaggtcagaggtcagcattagacatttggatcacctactttctacctgacttttcgacgcaaggtctctcactgaacctggagctgcttgccagttcagccacactggctggccggtgagaccgagttcctcctgtctctgtcttgctagcatcatgatcacatgggtgtgccgtaacaccagttttcatttttaaaaactatttaatttttttctctcttttaagcgggttattgtctagtaaactcaggtcctcgtgttttatagagtgaaccatcttccctgactgacattcttctttacttttctgaaaccatgaagcccttactttatatcaaggtgctagctagagttcccttggggactgggggactagaggacagcctgtcaacctctcttttgggggagacttccatttgtcttgataatctccctctgtttttctgggattttacctttttctttgagagcgagagaaggggttgggtggggaaacaaatagaagaaaaacttggctgaccataggggatggtggcttccagacatcaaagtgggcagcagagccccggatggatgggctggaagcaggcctctgtccccttaggctttccttcggaaactggcagaggccctggcgggaacttctaagagccaagagaacaagtcttttcatgtggcctccctttgagctggcttctgggtggggttggggtcggtgggtagagggtggggagtgtgtggagaggtgaggccacagtcaggttgggaaaacagattgggcagcggctgtgagcacagggcctccattgtgcagctggctcttgctttcaataactggctctgaagaaggtttcattgaatgccagagaaaggagccattgaaatgcctggggctgggactccatgaagggttaaagacaggggctaagtcactgtggctctgttgctcctggcttaggtagatgtcccacacagggtccctatgcactgagaccaggactcagagagaaggatgcaaagatcaagctaatgggtacccccatgtaaagtagggaaacccccttttttccatgaaccacattgtccaagtaatatttaataagtaacaggcctccaagatgccctgtgggcctgccttccggggacagtgacctatgaacaggcctgtctcttcaggacttcttaagagtgctctccgggtgctccaccactctctcagtggcacagccagcatgacattgttaagccactttctaatgatcattaactattgtaattctcactgttcccccaaagagtgtgggtagactggtaagaacagctgtcactaaaacaggtgactgaggaaacctggaaactctctttggagggactttctccaaaaggactagctggttaggaggtcatggttgggctgtcagggggcaccagaagtggggtgcggtacccttatactcaggaccacatgctttgtttccagcaatggaggactgtgcggaccgagatatgtatacctatgaaattgaggtacctgtgtggatgctacaaagaacaggcagaaggtagtgacatgatctgctgctgagacgggcacacacaacgaacctccagtgccacagtggtgtggctccttggttgtcacagaactctgggaagactttactgtctccagaagtcaagtcggcaggaaggatgtcctgggcctgaaaggagctggcactctttactttagatcaaccattccggataaaaacattaaaaaaacagaaaggggctgaggaggtatcttggttggtaaagtccttgccacgtacatatgaaggtctgaattgaatcctcagaatccgtattaaaaatgtggacagggtggtatactggtgatttgctaggaggcagcgtcagcaggatccccgaggctcactggtcagccagcctagtgttttaaaaagacaaggctgatagtgttctgaggaaggatactctgacctttgaagacatggacacacagacacatagacacacacatatataccacatacacacagagacatacccaccacatacacacaaagacacagagagacacacacacacagacacacacagagagacactcacactcacacatacacatacacgtacacaccatacacacacatatacacaccacacatacaacacatacataaacacacacacacacacacacacacacacacacacacacacacacacagaggcatttcttgtcttataaacagtctctctagtaggttttaattaatccgtcacttcctgtgttctgggtggtgactaggtgaaggccttggatctgttctggagatatagctctttgctatagcaccacaggctctcagaattcacccgcctgattttgtttattcttgttatttctctctaatgcgtctctgtgtgcctacgttactataaaatgagcagtcgcctccagctacctttatatatgtcctctgagatgtgtctgatactcttggaatgggaataacatgatttccttgtaagaattgtgtctaaagtgagaggcagaaagcttagagtaaggaaggcttaagaggcccccttccgggctggtgagatggctcagtgggtaagagcacccgactgctctgagcacccgactgctcttccaaaggtcccgagttcaaatcccagcaaccacatggtggctcacaaccatccgtaacgagatctgactccctcttctgaagacagctacagtgtacttacacataataaataaataaatcttaaaaaaaaaaagaggcccccttcctacataaggggttgaactctgtgatatttctgacgatcagaggcctgctgtaaatcttgcaaatctctgatatagtccagcctagacaaatgcccttcagtgagatgtcagcacacatagtcagtatatagggtctttgccaaggactgtaaccagaaggatctatttagctatatataaaataagataaatttagttaaaagatgactaaatatacatatacatatatctactcacatgcacagatatatcaatggacagagtcacagaatagactcacccagtttttcactttaatatctctgcaccctaaaaagctgtctttgggacaaatgactagaataatgccacttttaagttggagaaacctttccaagtcttctcgtattgccttctcttttggttcaggaatctcacctctacacagctgggcatcttactcctttcttgcttagatctgggaatggggaactcacttttttttttttcctgagtctaacttcatgggtggaagtgaaatctgtgacagctaggaagtaacagagctacacccctgccatgtctgatctgcatgtcgtgggaagatgttaagtttcttgcagtgttttgatgtggatgtcttgtggggggtaagggataggaacacacgtatgcgaatgggaagcagatagtgagatgggggcatccgtgagagcatcatctaggaagcagctaggtctgaaggcagcgggatgctccacgtctggattgatttggccagagagtggccctgagcttgagataccttggtaggtattctgggtgtgtgtgtgtgtgtgtgtgtatgtgtgtgtgtgtgtatttgtgtgtgtgtgtatgtgtgtgtgtgtatgtgtgtgtgtctgtatttgtgtgtgtatgtgtgtgtgtgtgtgtgtgtgtatgtgtgtgtgtgtgtgtatgtgtgtgtgtgtgtgtgtgtgcgtgtgcgtgtgcgtgtgcgtgtgtgtgtgtgtgtgtgttgggagtgggggtgaggtggggagtgctgatgaactttgtcccaggaaagagggcaagtaccctgggaaagacacacaagcacaagaagataactggctcaatgtgtaagccacatgacctggatccacattacactgtttatttccaccctgtggtttcggagcctttggaaatgtctgctccaaatgttccagcccggcagctataatggtatttaagatggagtcctgggtctgcgtttatttccctagagcattggtggggacaatgacttctgaggtacgctaggtttctactctaggtttgggggttaccaaaagactgcattcaagtgttgggaaagaagggctgggctccaggagtgcgtctcctgcttctcttcccaggacattcatccactgttgactgtccttttgttaaggaagctgtcagagtgtttataaaagaaatcccttcaactggcctggaatctgcctcctagtgactctaacccacaagactcagttctcaaaagcagggagcagaacaatgggccatctgcagctgctgagtgctgactctgagcaggacacgtcacagagcgtgatagtgtctctcgtttgtgtgattatatcatttcacagatggagaaattgactgggagaacaataacacaacttgccaaggccagacccccaaataagtagcaggatttgaactcagacagtctgacgtcagagccttgtcctcaaaatactgtctgtgtacgacagcccccgtggggttgtgcagcctgggacccctatccttttaggcctctgggggaggggccagactaaaattgcagcctgttcaccttgccatctctcttggtgtatgaataaggggaaggtcacattggccaatagtctgggacaaacttaagagactgaaaagccctcatccttgtgacctctagtgactcaccttgtcacccaggacaaccttgctgtagcctccggaagcaccgttttagcaacggctccctggggaggctgtgcttttcctgtctgtcctcagcatcttttgccagaacaacaggctgctttcccttttgataagtctggtcaccctaaatatggggcttggagcaaacgggagcactggccccacgcagccctcatttccaaatgcagattcggactgtgctgctattctgatttccttccacacacagtggttttcagtaggagaggagggatcttggcaggagaaaggtgctaggagggaagacatacctgggagtttttgtttctaagacactggcctttaagactatggatccctcgcacagtggtctcacaacaaagggaagtttggcatcgctaatcccttttgttggctagcagtgtccacgctaaacatcgaagttctaagagcaaggtggctcggcaggtaaagccaaagcttacaggcctgggtttcactccctcaagctgtcttctgatctccacacacaggtcccggcagtctcaaccccacccatatacacacatagaaaactaactaactaagcaaataaatacagattaataaaaagattggaacttatgcagagccacatcagttcccgcccctccaaaccctcaactgcgcaaaggtcagtaccactgcttatgtccaaaaagacagcctgtggtcacttcaggctggatgctgacagggaaaatagaaggttgactgacagagagaaaaccccacttacagcattcctcagaaacctgtgaaatgggtttccatctgacaggaaaaaccacttccgcctcctggggcagtgaagaatgaggtattgggttctctattggcatatactacatgacatcgaagcccacactaaccgccaggctcctgttaacatatacctgtggtgcccatcaaggccactggctgttctgggccacaagcccccttcctggcttttcttgctattcttccactatgctaactcctgggctgctccatgctacaggtttctcttctgacccagcaggttccctttataacaagtatggcttctctcggccacactgatagccctggcagtcaccagtgtacctctccgcctcgaaccccaggtagccttgacggctttgggctccccccaaatgcctctggctattctttttctaccacctgtgagagaaccactcagcagttttatatttacaataaacccttctttacatccgtggagtcgtccagttcagtggcttcatgggtccctcgcacttactggtcaaagttgcccatgggcacttggtggctagatctagtcctcggctaggtttgctgtggcccacacagtgcttaaattagttagaaacacttaacaatgggaagagccgcccctgtatcaccataacgtttgacttgaatgtccctgtttatcttcttggaggggagttggcccaggtggttgcaggagcccattaacttactcatccattgcattcattcaagcaacagggttgagaacagacagtgttaagctcttcttaaccctggagggatcctgtggatataagatgtatacaacacttttgccatctagaccagccatgcactcttagcaccttataaccagctaagaagtggtgtgaggaaggtaagatgtggaaggaagagaagctggcagagtcaggaggaagctgccgttccagcagtccattggctctgtgatttagcagagctagttcctggtcatcccaggaccttggtctctccatctctagaaatgacccagttggctcggaaaatgaactggacttttctagggctggcattcatatactaagactccatgatctaggaatgcctggccgaactattccggaattgttccactgaattccaagcaatccccctcccttctctggagtccgggccaggagcaggccttagaactagcggccacagcgggtctgggctgcctgcccgggggcgggacctttttcgggcgtcccacccctccacctgggttctcagcccggcagatgttacaactttttctcccgctcttgggctgtgtcccttcccagacccgcccagcccgtgtctccctccccttccccctgtggggtcctgcccacctcccagcctggagcactgctttgcggggataccgggcggggtcagaagctcagctaggggaattgggggtcgggggagggaggagaaatggaaagcagaagcgagagaaattaagaggcgggagggatcggggtaaaagggaagcggagagtccggggatggtggagagcacttttgggaagcctccactccacgactcaggctggcccgtcagagctgggggagagggctgcgggaggaggctcggcgggagcctgaccttccgggagcgccctgctgcctgtccgagggtcctggaccagagccccgagggctctgactgcatccaggcgggcgggagagcaggcgttgcgcccctagcgcggcaggctctgaggtcctgggaaccccgctcgcccagaccggcgtcgcaatgcatgctctctcaggattctccctggtcagcctactcagcttgggctacctgtcctgggattgggctaagcccggccttgtggctgatgggcctgccgaggctggcgatcagccttcggtggctccaccgcagcctccacacattatcttcatcctcaccgacgaccaagggtaccacgacgtgggataccatggctcggatatcgagaccccaacgctggaccggctagcagctgagggcgtcaaactggagaattattacatccagcccatatgtacaccttcgaggagtcaactcctcaccggcaggtaggcatggcccattcccgagggactgggtgtccaaacccccagcacacccagttggtaggttgcaaaccccgcagaatagctctgtgcacggacctgagaaacacgtgttacgagccagctttgcctgcaacatctgttagctcatccataagtcccttgccctttttggacctctgtttccccaactctcatagttcaaggcttctgattatcttcgagaccttctctgtggtccacagttggttcctttgtttaatcagaagaatctttgactcttattttgaattctgtgcatattgacagatatggagtcagttcaaaagtcacttgactctcagtttcctggtccataaaaatggactgagggagagtttctatcctgaggaggaatagtgaaaggtggaggaattaggtgtaacttgccaggcattcaataaatgacagtctctgtctgtattactggagagatttgggtcctgtgccgttgatggcaccattgggagaagaccaaggaactggtaagatgcagagacctgtagcctgaggctggttgcttcccttttccaagtctccaagttttctcatctgaagaatccccccaaattgtgtgaagagaagggagggctggggattaccagagaaaagatgctgggaaaccaaagggggttgtggcaggcaaactccctttgcttaggagacaatccctgggttgggctgaagctaatcctctttggaaggaggccatcgcctgctttgggatcactagcgagatctcgggaccatgggccacctctctccgtttcctgggtgggacaatgaggcatggaattaaggagaggccagcttgatgtttctgcccaacttcaaagtcttgtgaaagagagggttatgaagtcagaccctggactggtggcttggagctcgaaaccaaactgtggtgtccttttctctttccacctgcattccgtctgccttttagatccagggatcgtgaagaagagcagggagagggagacaggtgggaggtttgtgttgcagaggtggctcagtagtggcagcagaccttggcatgggacagcgaagaggcaggacaatctgcatttcgagtttcccagttgatgtttctctccccaggtcgacgtgacattggttaactgccgagtggacagttagtgcagcactccaggctcttactggtgaagttagtggagcattacagagccagccgtgtctgccctccaccctcggcagctacctctgtctcacggatgctcgctccacggcttggtagcttggtggcatttgcttatgcagccagtcctgtttggtgtagctgggaagagccaaagtgtcttatgttactcactgacaaatggactttggcaaggcttagcgggcccacccacattacagaatcagtgtttcagaggcaccccacccttatgtggagacactcagctgggatactgggcccctaggatgcttctcctgtcacttccaatcatctctcagcttgccctgggtccaaaacagttctactgttggccagctgtctggctttgggtcccactgctacactttgggggcttcagtttcaatatttgtagaatggagttgatgataatgtttcatacgtattttacaagagaggtttaggttggtgaaatgtctcagcaggtacaagtacttccagtgtaggcctggttactgagctcagttcctggaacccactatggacagagctgactccagaaagcggccctctgactgactgtgtatgccttggcgtgagtaggcccaaactcatccactcgtaagacatgcgcgcgcacacacacattattaataatagctaataaataaataaataaataaataaataaataaataaaattaaaaaacaaaacaaaacaaaaaagaggcctggtagtgcaggcaggtctgtaatccctgtaaactatttaggaagctgatacagtgctggcttgggcttgcttgagttcgttcaggatgagcttggtcaacttgaagttctgtgtcaagataaaaagtaaaaaaaaaaatgctgggggcataatataactaggtggtagagtgcttctagagcatgctcaaggctggaagttcaaaacaaattcacacacactcacacatatacacacacactcacacacattcacacacacacacacactctcacacacactaacacacacacacacacacacacacacacacactcatggggtacagggagaattgaatgagctaatgcttaaatgtggctcgaagtcttaagaatggccttaagataaggaagcagtctggtgtcaaataccaggctaactcagctgcctaagggaaaggacaggtgtgaaattctaactcccctgtgacatcccaggtggctttacttgcaactcttaaagacatctcaaacagatcacgtgggtcatgcagatctcagcagcaaaagatgtggtacaaatatataaaggaagctcaggaactggcaaggcattgactgctgcataggcctggggggatggggcggagggcttgagggcttgagctcacagcaggtggggaatgtggggtgggggccgctggtctgataaagcccaggagcagggcacctctcagggatttcccgttccagccagctcactcacacctgcaaacgtcaaccagccccatatgggaggaggtgggcagtctacttttgaaaacactgctgcttggactgtttggtttcatgttcaagtctcagagctgcccttgactgctgagtgaccttgagcaaagcccctctgccctctgccctctgttgatgttttttttttttttctttttaaagtagatgaaaaaatctaaaagaggatttgggtcacttctggcttccaaaccctctgaattcattcattcgttcgtcgattcatttgttagtttgttcactctattagtaactgagggagctttaaataccactgaggtgtgaggaatacaaagacaatcccattctattatcaccgggctcaagaagacagttgtaatcctagggccaagtcgaccatgaaggtatgcaccaagtcgaccatgaaggtatgcaccaagtccctgctgcagggaagaggacccagaaacaatgtaactcactctctgggtgagctatgagagactatattggggtgggcttccaaggagtgggagtttgcctgggagacgagacttggtgtacccaggttctgtgctaagtttacagcttagagctcaaggactcactcaggtctggagcctgcctgtgctgggatgcagaacccactcttcctactagccatgtgagtcaccaccaagctcatacggttccttatttgggaggcaggaataataacatgcacttcctagtttgcagtgaggatttgagccaattcaaagggagcgtgatgccgaacatacagcaagagcttggtgttagctcttactgatgtcgtgcccaagcctgcctccactcttcatgcaccagcttcctggctatctggtcctgggcagtgaacgtaactgttctgagttattgcatctcatcaataagttggcatacatacctgccttggctgatgtgccggtttgagataaagtagtgtaggtgcttagacctttggtggtatctgttgctttcgttcctgttcaggctggtggcataggaccagcattcatctcagggtgcaactaggggttgctgattgggaacagtggtttggatgtagctcacctttgtttcccatatatcaatctctcacccacaggtaccagatccatacaggattgcagcactccattatccgcccacggcagcccaactgtctgcccctggaccaggtgacgctgccccagaagctacaggaggcaggctactccacccacatggtgggcaagtggcatctgggcttctaccggaaggagtgcttgcctacccgccggggcttcgacaccttcctgggttccctcacaggcaatgtggattactacacctacgacaactgtgatggcccaggggtttgtgggtttgacctgcacgagggtgagagcgtggcctgggggctcagcggccagtactccactatgctctacgctcagcgtgcaagccacatcctggccagccacaatccccagaatcccctctttctctatgtggccttccaggcagtacacacgcccctacagtcacctcgagaatacctataccgctaccgcacgatgggcaacgtagcacggcgcaagtacgcagccatggtgacctgcatggacgaggctgtgcgtaacatcacctgggccctcaagcgctatggtttctataacaacagtgtcattatcttctccagtgacaatggtggccagaccttctcagggggtagcaactggccccttcgaggacgcaagggtacttactgggaaggtggtgtgaggggcctgggttttgtccacagcccactgctcaagaaaaagagacggaccagtcgggccctggtccatatcacagactggtacccaacactggtgggtctggcaggcggtactacatcagcagctgatgggctggatggctatgatgtatggccagccattagtgagggccgggcctcaccacgcacagagatcctacacaacatcgaccccctctacaaccatgcccggcatggatccttggagggtggctttgggatctggaatacagcagtgcaggctgctatccgagttggggagtggaagctgctcactggagacccaggctatggtgactggattccacctcagacactggcctccttccctggcagctggtggaacctggagcggatggccagcatccgccaggctgtgtggctctttaacatcagtgctgacccttacgaacgagaggacctggctggccagcgacccgatgtagtccgcacccttctggctcgcctggctgattataaccgtactgccatccccgtgcgttacccagctgcgaaccctcgggcccatcctgactttaatgggggtgcttgggggccctgggccagtgaggaggaggaagaggaggaggaggaagaggaggaaggcagagctagaagtttctcccggggtcgccgcaagaagaaatgcaagatttgcaagcttcgatcttttttccgtaaactcaataccaggctgatgtcccaccggatctgatggcttagggtggcagggaatctcagttcccctcagacactctccctttgctggttctcagggaggaggcaaggtcaagtcttcatctgtaggcacgtggagggagggcacagaagccctcagctgaatagggtgggacttggggaagggcagcaaccaggctgggttgcctgggtcacaatcctgcctctttcctgatgagtttcctttttgccctcaggttacctatagcagcattctgcctcaatctcacccctaagatgagctctggtgactttaggactccagtgtacacatgtgtctggggccatggcagggtttcttgctgaccttgtcaccttccagacaacttgagtccatgaccctctttccagctctctgtggtgctcttggatatcagctggagtatggccagctggctgctgctctgttgaacaactcaatgagagaacggacagggtaggctctgagaaatctttacgttcctggagcctcatgacttgggagcctagtggaattcttctcttttggtccccaacatctggggggagggggaactggctgagcctgagccactgtatagtgagggtgggggaaacagctgtgaaaggagcctttgatttggtcttgaacacagttcttccccacagggccttgatttccctacttgcaaaggagtagggaaatatgagccttggctctgcctacctcacgttgctggtgctgtagaaaactggccaggctgatggttgtggaggagcctgtgaacttgattaaagtgccattatccagaggcaagagatgctggtctgtgtgtgtgtgagtgtgtgtgtgtgtgtgtgtgtgtgtgtgtgtgtgtgtcttggagacctgtgtgagctcgatgctagcagaggggacagaaggtaggtgggaaggaatgaaggaatgaaggaaggaaagaaggaaggttgaaaggaagaaaggaaggaaggaaggaaggaaggaaggaaggaaggaaggaaggaaggaaggaaggaaggtcctgccacaggcttaccatgtagctgcaggcaaacccctgaccctctctgggcctaagtgtttctctacacacaatggatgattcaagagtccttacttttggtggttacaggcacccctgtgcacatttgcatctggggtgggggggacacaggcttggtagtgttgaggaggggggtggttgtagagcctgctagctgcacactgcgttctgcatatctcccttcaggtcccagtcggcgcagtgtgtgtaggcgaaggccctgctgtgaattttgaaaatagttatttttgtcactggcaaaggaggccctgttaggactcgtcagcttgtggatgagcgggatgggtggagtggggtgggtgcggtgccgccgtggggggttaccgctgcttgcagggctgcatcgcccaggcagtgactgaatcctgcatgagggcctggcctaggctgtggggaggagatgaccactgcgtcctagatctttccttagccctgtgcttcctttcttccttttttccttaagatttatttctaatgatgcgtaggttgtgtatttgtgtgtgggtatgtgcacttgaataaaggacccacagaggctatagacatcagatcctcctagagctggggttacagagggcgtgagttgtccaacatgggcaccggaaaataaacttatgtgctctacacgaccgagctgtctctccaacaccagcccccttcttttgacttttctcatctccctcacttgtatgttttcccttcctcgataatgctgatacccagatggtaggcacggcccaggataggcaggggtctctgcgctccagtggctgtagtggttttcctgcctgctctgaagaagacactggctaaggtggtgtcttagcctactgtatcctagaggtgggttattcatagtctgcccactgcccaacacactctaggcctgctggggcctactctaactctgcttgctggcttgccaccctggcacacagtgtaggcttccctgtagagccaggctttagaaaactgtatgagtacttctctgagaactgctggaggggccctgcctgccaggacttttcaacttccagccctgtcatctatatcacttctgaggaccccgtgtgggggtcacgagaacaagaccatatgtagtgctttctgttctcccttgggtcccaggctctgaatcaatctggtcccaagatataagggatgattggtgctgaggctggtgtctgtttctgaagttttgaagacaagggttggctcaagcctccctgtgttcagtcctccactcaatgcagaactcagtgaactcagaattctcagcccagatgccagcatagcccagcatagcccagcatagcccaggagctactggagcatcagtttgaaaccaggtccgcaggaactagtgggcaacagtgtgtgaggccagtggtctttggggtattgtattgaattgagaggtcctgcttagcagtcagcatgcccacaacctgttctctacggtggtccggattcccctcagcaagcacacctgaatctttactacatcccagttcctggttggctcctgacttcgggttactatggctgtgatgaaacactacgactaaaagcaatgtggggaagaaagttaatttttttactcgaccttccatagacagggttcatcactaaaagcagagggcagaggaaaagatagctcagcggttaagagtgctgtctactcaacaaagaggtcttgagttcaattcccagcaaccacatggtggctcacaactgtctatcctgggatctgatgcccttttctggcatacaggtatacatacagatagaggactcatatacataaaataaataaataaatctttaaaagcaacaagggcagaaattcaagcagggcagggacccagaggccaaagctgacgcagaggccatggaggggtgttgcttactggcttgctcctcatggcttgctcagcctgttttcttatagaacccacaaccaccaggccagagatgggaccacccacaaagggcagagcctttccctatcaatcactaatgggaaaacatcctgcagtcggatcttatgaagacattttctcagctgagcttccctcctatcagataactctagcttgtgtcaaggtgacttaaaactagccagcacagcaccttatgctcacatcacctgggtccctttggagaggacatagttaaagggagcccagaggcagtccctaggccacaggtcttcattgcccctctctgggacggattagacaggctgcagacctgttagctggaagagttagattcaggcaagagcttgaatctttacctgatcctggctatggagtcctggcctctaatgatcagctccctaacaacccaatggagccatatacctgcctgggccatggctgtgtctcctcttctttcagacactcctggcttgcctaggacacaggctagcatcctgtcaatgccaggaaggggcacagcagggaaagagcaatgctgttggcctgactgccaccaactggtgtacctgttagagggcaacctctattctctgcaccttggttcctagctctaagggatatgtggcccctaaaggtcttcatagcttgatatgggaggcaggggggctaagaacagcgcaagagtggtgagcttgcacagacccggatttgatctctgggtgagtgaggaggaaatgagatgggggtgggggaagccctatttctagctgtcttagcataggaactgaacctccttctgcagggcctgtgtcactgcccctttcccccagggagggcccctgcacggggcacctcagggcacagccctttttccctccctcctctcttagacctggaattactcaacatcctgccctgactcagttgctctcccctcagaccctcacagtcttccttctcttctggcccacttttggctgagcctgcccccaactttttctgcccttagtgggacaggccccatggggaccattcagatggcacttttttccccccctggggtggttttctgtggtggtgccctattcaggcaactgcaagaccctgtggcatttagcatatgcatgagagcacatgaagaagctagctatccctgtgtgctgaggattgtaatcctctctcatccttcccttgtctcctggaacccagcccagcctcctgtccctcccgttgacacgagccaatgctggctcagcaaactccagggctcccacccctggccatcagcccttggcacacaggcttgtgcttgagtactgcacacgtgttgcagctggggtacacgtgctggactgttatgcctactgtggccccgggggtgtgtgggaagtctggcagaaccaatccctccatcccccgatgcaatcatcagcttattctctcacggccactcgggcatgcttgactccttgatgcccgccgccactaggcacagctgccagctttgtgggcacagaggatgtggcgaattagtggtcatgcctcctcagtggaatggcaattgcactcagcatgcaggtgtctaccaaaggcagtccctacatccccgatgtactctcgagacccatctaaggactagatctagtctctagaaggtcccatgcagatgtaagacagccctccacagggagattcttccagctagttctctattatcagatgggtctaagatcctaggacctgcctatcccttagccctgcattcagcgagagaaggggtaaagatgtgaggatgccagggaggaaggaaaagggcacaaggaagaaagaaagggaaggaagctggaagcatggaaggacaaagatggtgaccacagtagaattaggatcccatggttcctgtcagtggcaggcagctatcaggctgtctgtgcctccctgagcccctggggcatcttctaaatgctttgctggcctctgagccaagcactgcataccatcccgtggggagtgacaggccagcactggtcaacgaggatgatggctacttttgttcacagggtaacatctccatggttacagcctttgcacattcctcttagtactttaccaatctcaaagcagttgccaagcccttgggccctaataagtgagggtcccagtgccctctttttaaaattccttgccatttgttttgcagaatttactgcaaataaagccaaccccaggcaatgtctaaaccatgagttaaccccccagcaaggtctcagagaactgtgccccagagagctgccaaggttcagggaggagtatgaggagacaggatttctagttccttaataattccttctgtctcagccactgtgttcatcttgtttcagccacaaaactacctttattggtaaggaacattatttacccagtttcacacttgaagaggtccagagacgttaacacatcgattcaaaagcacagcctgtaagtcacatagccactgttagctgatcgacactatttcccctgggcaatggctgggtgattccagggatccccttgggaacaggctagagcactggctctcaacctgtgcgggtcgtgacctccttgaggggtaggggtgagggcagtgtcaaacaacccttttacaggagtcgtttaagaccgttggaaaaaaaaccagatatttgcattatttttcgtaacagaagcaagattatagttatggagtagtgacaaaaattatgttacagttggaggtcagcacagcatgaggaactgtatttaagggttgcggcattaggaaggttgagaatcactggcctagcggatctgaatcaggaacacggacgtacagctctgcgccactcctgccttcctctggtgcctctagccttgcccatggtgttctgggcctgcctgctacccaccagctgtgcggccctgtgagcacaggcctttctgctccgctctgaattgccacgttggcggcagaagcgggaagcgtattgtgcgcagaaacaaaacggagtggttttttttttcctttttctgaaggtggtaatggtgcaattagtggcgaagccatcaccccctcctccccggctcgcctccctccttcctctccacctcccttctctttctttcctgagaaaaaaagtggctgagttgaaaagatctcccgtcaatctttctgtaacggactcaggaagagggatagagggccccctaatgtttccagggtcctcgagcctcagttgggtcaggcacttgttggtgctggagaatattcaaaggtaccactatgttccccacaagggagttgagcaatggattctgaggagcaagtttgaaacagagaatttgcgttcccaggtcttgtgatctgccccttgttcactgggggacaaatgctggcatgagaccctgagacctctgctcagccacctttctctctctctctctctctctctctctctctctctctctctctctctctctctctctctgtccttaatggaggtgtgtgtgtgttcaagaccaagctgcagtgttggagtgcttgtgggctcattttaaaacttccatgttttgccttctagaaactgaaacataagaaccccattatggccttaggtcacttcatctccatggggttcttcttctgattttctagaaaatgagatgggggtgcagagagcttcctcagtgacctgcccagggtcacatcagaaatgtcagagctagaacttgaactcagattactaatcttaaattccatgccttgggggcatgcaagtacgatatacagaaggagtgaactcattagggcagatgaccaatgagtttaggaaagaagagtccagggcagggtacatctacaccacccgcccagccctgggtgagtccagccacgttcacctcattatagttgcctctctccagtcctaccttgacgggaagcacaagcagaaactgggacaggagccccaggagaccaaatcttcatggtccctctgggaggatgggtggggagagctgtggcagaggcctcaggaggggccctgctgctcagtggtgacagataggggtgagaaagcagacagagtcattccgtcagcattctgggtctgtttggtacttcttctcacgctaaggtggcggtgtgatatgcacaatggctaaaaagcagggagagctggaaagaaacaaggacagagacagaggccaagtcaaccagaccaattcccagaggaagcaaagaaaccattacagagactacaagggggaagggaaggagagatgaattagcttcccctgtaaaccttagaacccagctgttgccagggcaacggggcaatacctgtctcttcagaggagatgaagttgccagggtaactacatcctgtctttctcaaggaccatcccagaatgtggcacccactagccgttaccatagcaactgcctctttgccccacttaatcccatcccgtctgttaaaagggccctatagttggaggtgggggaggtaggaagagcgatgatcacttgtggactaagtttgttcgcatccccttctccaaccccctcagtacatcaccctgggggaacagggtccacttgctcctgggcccacacagtcctgcagtattgtgtatataaggccagggcaaagaggagcaggttttaaagtgaaaggcaggcaggtgttggggaggcagttaccggggcaacgggaacagggcgtttcggaggtggttgccatggggacctggatgctgacgaaggctcgcgaggctgtgagcagccacagtgccctgctcagaagccccaagctcgtcagtcaagccggttctccgtttgcactcaggagcacgggcaggcgagtggcccctagttctgggggcagcgcttcagcatcccagccctagttcccagcctaaagcctcgcctgcctgcccagtgccaggatggctaccatcacctgcacccgattcacagaagagtaccagctctttgaggaactgggaaagtgagtcacacctcagggagtcctagagagcatggggatcagtctccttgggcagggggagggggcgtgtgcctatgtggccagagctgtcccgtgcatgcagagggaggtgtgcagcatgatttggaagcactgtgtatgcatagggtgtccagagttaggcgctgacacatttatgagtccagtcagcctggtgtgtgtgtgtgtgtgtgtgtgtgtgatggaaaggaaacagattggtggtgtatgcacacacctatgcatataaatacacatgacctgggttcacaaagatatctagaaacttggggtttgaaagggattttcccacttggctggatctgagctggaatctatttttgtagttgtacttagaaacctccaatgacaaagaaagtttgccaccccctgacctggagatcttgtctttagacactgtgcagagtggctagctttctcctagcacatcccctccggcttccccagataccttccgggagcaacagcttcagtacagaaggagttaatataaagcaatcacagtgttgggaggaggggaaggacagtcagccagccggggggtgccactgtggcactgactatacaaaacaactgtggtcctttggcaaagttgcccatcgtgttatatctcaggaggctgagaggagaaaggttccctccagaagagcagcaggctacagatataagagaaggtttctagatgttcccagctaggttatggggtcctgggttggatcaggagttgggggagcagtttggcagagtgccccacggatgcatacgtgctcctaccagtcctgtttggttcctgctgtagcgcagtaacatgagacaaggggccctgtgagcagatgtgtcagtgtgagctcctgcaggtacacagatattgaggagagactatatatgaaatctgtgtgtgtgggggggaacaaatggagttgtgtaagaactgacactgggcacactgcaaactgaaagggcaaacactggtgcaagtaaaacaagaagagatgtgtgtgtcatttgcatggcaagcccgcccccctccaaaaaatgttcatgcgccctgcaagggtgcatgtgtgcaattatgcaagggttgttcttggctaggtgatgttgcagcaagggtatggacatgcatctgtgtgcacatgtgtggcaggtcagagatggatactctcagtgaatgtgtgtgtgtgtgtgtgtgtgtgtgtgtgtgtgtgtgtgtgtgcgtgcgcgcgcgcgcatgtgtaaggtcacagatgtgaaatgtgaacagaatgttcttgagtgtgcatgtatcttggggactatgtaaaggaagctgtgtgtgtgtgtgtgtgtgtgtgtgtgtgtgcgcgcgcgcgcatgtgtaaggtcacagatgtgaaatgtgaacagaatgttcttgagtgtgcatgtatcttggggactatgtaaaggaagctgtgtgtgtgtgtgtgtgtgtgtgtgtgtgtgtgtggcctaggctcatgggctcatgtgggtgtgtgggtgttgtaggcatgtgtgagcttatgctggtgtctgcatatgtgtgggaggtggacctatggctgtgtataagcacagcccctgaacacacttacacacagagagagagagagagacagagacagagacagagagacagagagagagacagatggagagacagagagggatagagagacagagacagctcccttgtgcaaatgtgtattcatatttgtctacagactttctgctgttctgcgtgtctttgcgttggaggcaggggtaggggcaggaatgtagtttttagggtggctcaggagaactgtcttttaaagtttatctgggacccctttccagagcatgtctagtgttcccttggaacctaaggatttcttgaatagtcaggagctgcctttcaggggccactgaggctggttcaggcaagactgcgtcacagagcgcagtggaaggaattaagatgggacttcagggatcacagtgacagtaaactgctcttttgccctgagaagaaatggggatcattagaactaggctctgtgggctgactttgccttctcagccccccccccccgccttcttggatactcagaggtgtcagagaaggggcagaggaaaactgagggtggcagggacgcctgggtcttgttcaatcaattacagatctcctccttccagaactattggtgcttttaacctttttttaggtcacttattcctccaggattcagatgaaagtctaaatagatattccctagaaaaacgtataagcctacaaaatgttgcttgcagtgtcagagcttgtgggacctcaggaaacagtgcaccaacctgtgcttgaagatgcttgggtgaaggagaaggggctgtggtgggccggcttctgtctggtgtgtccgtgtgacacaggccagggtaccctatgaaggatgagccctgtggcttttgctctgcaccttagccttggcctgagcatctggtggggtagggaggggctgccctacatgacccttagctctgtgacactgggcaggctgccactctttctgacctgcaagctggagatttagaagactgggaggagtatgtagatggcatgtgaagacacagcctcaagcctgacacgcagtaggcatttggcaggacgttgctgctggggtggctgttgtcctcaaggattgggccagccttt

SEQ ID NO: 334 - DNA, 2213 bp, Mus musculus
gcacttttgggaagcctccactccacgactcaggctggcccgtcagagctgggggagagggctgcgggaggaggctcggcgggagcctgaccttccgggagcgccctgctgcctgtccgagggtcctggaccagagccccgagggctctgactgcatccaggcgggcgggagagcaggcgttgcgcccctagcgcggcaggctctgaggtcctgggaaccccgctcgcccagaccggcgtcgcaatgcatgctctctcaggattctccctggtcagcctactcagcttgggctacctgtcctgggattgggctaagcccggccttgtggctgatgggcctgccgaggctggcgatcagccttcggtggctccaccgcagcctccacacattatcttcatcctcaccgacgaccaagggtaccacgacgtgggataccatggctcggatatcgagaccccaacgctggaccggctagcagctgagggcgtcaaactggagaattattacatccagcccatatgtacaccttcgaggagtcaactcctcaccggcaggtaccagatccatacaggattgcagcactccattatccgcccacggcagcccaactgtctgcccctggaccaggtgacgctgccccagaagctacaggaggcaggctactccacccacatggtgggcaagtggcatctgggcttctaccggaaggagtgcttgcctacccgccggggcttcgacaccttcctgggttccctcacaggcaatgtggattactacacctacgacaactgtgatggcccaggggtttgtgggtttgacctgcacgagggtgagagcgtggcctgggggctcagcggccagtactccactatgctctacgctcagcgtgcaagccacatcctggccagccacaatccccagaatcccctctttctctatgtggccttccaggcagtacacacgcccctacagtcacctcgagaatacctataccgctaccgcacgatgggcaacgtagcacggcgcaagtacgcagccatggtgacctgcatggacgaggctgtgcgtaacatcacctgggccctcaagcgctatggtttctataacaacagtgtcattatcttctccagtgacaatggtggccagaccttctcagggggtagcaactggccccttcgaggacgcaagggtacttactgggaaggtggtgtgaggggcctgggttttgtccacagcccactgctcaagaaaaagagacggaccagtcgggccctggtccatatcacagactggtacccaacactggtgggtctggcaggcggtactacatcagcagctgatgggctggatggctatgatgtatggccagccattagtgagggccgggcctcaccacgcacagagatcctacacaacatcgaccccctctacaaccatgcccggcatggatccttggagggtggctttgggatctggaatacagcagtgcaggctgctatccgagttggggagtggaagctgctcactggagacccaggctatggtgactggattccacctcagacactggcctccttccctggcagctggtggaacctggagcggatggccagcatccgccaggctgtgtggctctttaacatcagtgctgacccttacgaacgagaggacctggctggccagcgacccgatgtagtccgcacccttctggctcgcctggctgattataaccgtactgccatccccgtgcgttacccagctgcgaaccctcgggcccatcctgactttaatggggctctctgtggtgctcttggatatcagctggagtatggccagctggctgctgctctgttgaacaactcaatgagagaacggacagggtaggctctgagaaatctttacgttcctggagcctcatgacttgggagcctagtggaattcttctcttttggtccccaacatctggggggagggggaactggctgagcctgagccactgtatagtgagggtgggggaaacagctgtgaaaggagcctttgatttggtcttgaacacagttcttccccacagggccttgatttccctacttgcaaaggagtagggaaatatgagccttggctctgcctacctcacgttgctggtgctgtagaaaactggccaggctgatggttgtggaggagcctgtgaacttgattaaagtgccattatcca

SEQ ID NO: 335 - protein, 575 aa, Mus musculus
LHPGGRESRRCAPSAAGSEVLGTPLAQTGVAMHALSGFSLVSLLSLGYLSWDWAKPGLVADGPAEAGDQPSVAPPQPPHIIFILTDDQGYHDVGYHGSDIETPTLDRLAAEGVKLENYYIQPICTPSRSQLLTGRYQIHTGLQHSIIRPRQPNCLPLDQVTLPQKLQEAGYSTHMVGKWHLGFYRKECLPTRRGFDTFLGSLTGNVDYYTYDNCDGPGVCGFDLHEGESVAWGLSGQYSTMLYAQRASHILASHNPQNPLFLYVAFQAVHTPLQSPREYLYRYRTMGNVARRKYAAMVTCMDEAVRNITWALKRYGFYNNSVIIFSSDNGGQTFSGGSNWPLRGRKGTYWEGGVRGLGFVHSPLLKKKRRTSRALVHITDWYPTLVGLAGGTTSAADGLDGYDVWPAISEGRDRTEILHNIDPLYNHARHGSLEGGFGIWNTAVQAAIRVGEWKLLTGDPGYGDWIPPQTLASFPGSWWNLERMASIRQAVWLFNISADPYEREDLAGQRPDVVRTLLARLADYNRTAIPVRYPAANPRAHPDFNGALCGALGYQLEYGQLAAALLNNSMRERTG

SEQ ID NO: 336 - DNA, 26228 bp, Homo sapiens
taacagtgaagaggtcagaggcaagagtcattgatcacaactgattgcagttaagatgacgggctcaactttcagatacgtgatcatgtgaacacagtgtcggagcccccctcagggattagagaggaccctgtgctagggaggggtctggaagcttaagctgtactaatttcatggtcaatctgtctcagaatgggtgcctctccctatcttaaaataatcgtatgagcaggctgggcgtggtggctcacacctgtaattccagcacgttgggaggctgaggctggtggattacctgattgtcaggagttcgagaccatcctgaccaacagggtgaaaccctgtctctactaaaaatacaaaaaaaaaaaaaaaaaaaaattagctgggcatgctggcaggcgcctgtaatcccagctacttgggaggctgaggcaggagaatcgcttgaaccagggaggcggaggttgcggtgagctgagatcgcgtaattgcactccaatctgggtgacagagcaagattccgtctcaaaaaaaaaaaaaaaatcctacgaacattcatgagatacagacttactcatctactataagccagggtctgtgctaggaactgaggaggcagagaaaaactaagccagctgagtgcaaatccaatttctaggtatcacaacctccgtgagagacctggccctgagagactgggtttgcccaagagactaggttctcccaagggtgggtcataggataaaggaaaaaactaggctcaggttaggctataagatggggcttttccctttgataagcatattgaaaatccctgtgagatgaagcctccctccagggtaatcttgatgctgaaaggcctcttcataatcagaattccagaccaaagcgagtccacccataaagccaggagcatgggaattgacaccctcaaatgagaccttggagccatgctgctcgcaggaaactatcccctgcctgaagtcctggatccaggggacgagggctcagcctccaggtccaactgccagcgttggtctggaagcttcctgctgagcagaaactcactaatccctaaaccagctcttcctgccagtgaccagccaattaccactgcctgcctcagctccagcccagcttcattcaggaccgaggcactcttaatcatgtgaaggacacatattttggggtgttctcctctctgagcctcagtgtcttcacaagtctaagggaatgacaatggaccatcaactccaagagggccaggtggtttgtcttgtccatatctgtagtcttagtcccagtgagtgaaaggcacataatagttgctcagtaagtgcttgttgagcaaatgaattggataaagagatccttgatttctgtgtggataagacagcattctcgcagtagttggtactcatccagtagcaagtgacagatgtcaacacaaattggtgtaagaaagaaggaacgtattgttcccataactgaagtccaggggagtagttctagcttcaggtaggactggaaaggacccatgtactcaaatggtgttattgggaatctgtctttacctctcactttgctttttttctcttcactacagttagctccaggcaggtccaggcttctaatcttcttgctccaagtctagcagcaaagagacaatgaacaatcttgttctcaaaaatccaaacaaaattctcagaattgagtctcactagacagtcttaggtcacttgtgcattcctgaactaatcactttgaccagggacatttgatgctctaattgtccaagcctgctcctggagtcaacccatcagtggaaacccatcaaagaaaatctaggttctgtttccaagaaaggggagcagctgcaaggcagacaataggtgcccatcacagtatttgactaaagtctgaacacctaggcaactcttaccttctctaagcttcagtctcttcatatgtcattgataacaatgatgacactaacaaaattcctgccccttttacatcccagagctttcgtgaggtccaaacaagatcatgagttatgataataattaacatttattgaaggatcactggacatccggccctgtgctaagtaaaccctttacacatttagttttatcgttaccacaatccacgttactgatgagaagcaggttgagagaggctacaaggcttgtatactggtcacacagctaggaagggtggagctggggtttaaagcagtaccctcaagcatgaagctatatataaactgtaaataattttacaagtgtaagggattattagtaacggcctgtactattaataatagaaaatatttaaaaccctgaaaggaaattcaaataaattcaaacaaatgtttgtttagcacctactatgggctgatcactcaccaggggctcagaaagagacacataaataactctgaaacaggcagactgtgatctaatagaaccataaacatgccccaggggactgtggagagcaagagattgactgaatagggaaggaagggaggaggaggtctagaaaagtctcttggaagcggtgggatttgagctgggctttaaagattaaaggacttcaacaaaggaagggaaagggaaaatcaacttttaagagacctgaaaggatctaaagactcagaacagagttcttggataagggttcagcacttctatgcaaaataactttagcaccagcagggacttcaaaagtgattgacttagcagagcacagtagttgccatgggaacagaggcaagcctcatccctgtcattagagagcatctctggctttgagcagtctagccaaggccaggaggcagcgggggctgggttgtgctatcccttagaagaaaaacccagcaagattgctgccccgagagactgactctcatttcacagggaggcagagctgacaggtgacatctgggtctgagaacatagaaagccagaggaagcctctgcctcaaggggctttgggacatcctgaagctattggagcaggcaagggagcctcaaggagggaatgggaagggcaggggacaagcctgagagcggcttccaagatggatcaattcccactcagtctgggaggagcagagcagtgctggaggcagctccacccagcatcccagcgtggcagggggtggagggcgtctcccagagcatgcactcatgtcactcctaggcccactcagacctctcaggcctctggggcccactgccagggcattccagtgcattgggagcgttggcatctaaccactcaagtgcagaggggaccccattcacaggcttggtgacaggagagcatatggtggggactttaatgcagcaggcaataggtttgacacctatattcaaatcatggccttgacactttctagctgtgtgactttgggcaagttactcaccctttctgtgtttctcggtttctccatgggcaagatgcagataatgataataattttacctaccttataggtaggtaagaatttagtgagataatagatataaagagttacgcatggtacctggcacagtagatcgtcaataaatgtaagctattatattattattatcacttccgaatttcaatttggtatcgagtcaggtttttttaatttatttatttttatttcaggcagtgtctcttatcatttgtgctaaaagccagtttctccaagtatagtagatgatgacaatgacagcagtaatagtagtgacgggacccatttaccttccatatatccagtgacattatcatgaagaaggaaggcaaagttctagtgctgaatgccaggctaaacgctcgagctttttatttcaggcagctagtggctattgaaattttggaggagaataacttgatcaggggaatgtagatttttgccctgaggctatacacttgtagaaatagaatctaagtataacaacaacaaagcttagtaacaaaaacaataatagctaccattttcagagagctaattgtataccaggcactgtgctaagagcttcagaagccttgtctgttgtaatcctcacaacaatcttatgaggttatatatttctccttctccttctcctcctcctcctcctcctcctcttcttcttcttcttcctctcacccccattttacaagtaagaaaactgggcacagagaggttaagtcatgcagctagcaaatggcagagctgggctagaacacaggcgatctagttctaggagtctcacatttaaccagaacacgctttttccttccctgagccttggaaggccctcgtggtggggttggggggcagcctgccaccctcacttttgggagcccctctgtttgtctgcatctgagcactgccactctctatttgattctctgggacttcacctctttctttgaaagtatgtgtgtgtttgtgtgtatgtgtgtgtggggggtgtttgtataagagagaaactgcagctgaccagtgatgacagaagcctctggacatcaaagtgggcagagccctggatggatgggctggaggcaggcctgggtcccattaggctaattcctctcaaggttggaagaggccagggcgggaacttctgagaacatggagaacaagtcctttcatacgacctccctttgagcaggccttggggtgggaccggggtcgggtgggtggagggtggggagtgtgtggagaggtgaggccacagtcaggctgggcaaacagattgggcagcggctgtgagcacagagcgcccattgtgtacccagagctctgctttcaataatcttctcggaagaatgtttcattgagcgccagagaaaggagccattgaaatgccagggctgggccctatgaagggttaaagacaaggaggccatgggtacctgggctcttgcctatcctggctcaaagacctgatatagggatcctgatcactaagacaagggcactcagtgagaccacccagaggtctggaagcgagggtcagagggggagatgtatgtctgccccagaaaggctaaagtaggtgccccagtatcaaggaggaaaacccctgtcttcccagcaccattttgcccaagtaatatccaagaagatgttagataccttctcagataccccttcagcctgccttctgtggagagcaacccatcgggcagacgtgtctctgcgtggacttcctgcgtggacctcctgcgtggacccataccacgggtcctgcaatccattctccacaatgcagccgtatggcttccttaaacacctgtggcctttccattaatcagtaattaattataatgaatgatgctgaagcagagagtgtgggagttacggtaagagccagtggtcactaaactaggtgaccaagggaacatgtagagttttctcttccaaatagaaagacctgctcattagagggatatggcctggctgtcagagagggcaccagagtgggattctctgcttccacactgagtcccgcgtgtctttgccagctactgaagcttgtggggcttgaagtgtgggtaacaccatgctggcctcagtgggctgcacagaggaggcagaaggtggatgagaggggcctgccactggggagggagagcactcttgttgggcagctgagaatgacctccggcaccaccatggaacccgctgaagatgttgctgcctcactgagcctgtgtctgcagagaggatgttctgcaactgaagctgaccttgcactatgaaccgttcatattaaccattttggatggaaaccttaaaaaacagatgatgcctttctggctttcttaaaaagagatcctcaactcttaaaaagagatctaaactcacttctgtgcggaacggtgatttggcgatgtttctgggtctgttcaggtgaatatagttcttggctcctgcaccgataaaccccaaactcccaggcttttggaattcatcagtttgaatttttgtttattcttttgtttctccttaatttttcactgtgaaacatgtaagcatattttactataaaataggcaagtgtctcactttcttatatattccatctgagctgcttctaatattctcggactgggaaaggaaatgattggccttataagaattgtgaatgaagtaagagtcagtagacttaagagttaggaaggcctgaggagctctcctctgagttaagtgattgaactctgtgatattttgagtgttcagaggccttctatgttttcttttggtctttgatttgatccagcctagacaaattgacccctagagagaggacgacagcatgcataatttatgcataaggtctttgccaagggcaataaatcagaaggaaataatattggtacttagataattttagttcaaagatggccaaacatacacatatacctagccactaacatgcacacacacacacacacacacatacacacgaatagcaatgacagacaaagccacaaaaccaactaacccagtttttcacttttatatctccgctccctaaaaagttgtctgggaacaaatgattaaaatcttaacattttcaaatgggaaagagctttcacagtcctttcattttgcttccctctttttagttcaggaatctcttctattatctcctggatagacaggcactttaacccccttcttgcatggatccagtaatgggaagctcagtactttctgaagtctgatttcatcaatggaaatctgtgacaggaagtaacaaaactacaccctgccacatctgaaatgcattttgtatgcagatattaggctttctgtagtgttgtaatgtggatgtcgtttgggggttaagggaggagatcacatctgtgagaatggggggacagatctttcctgtgtggggtggacattcctcttgtcaattgtcttggaaacagctgagttctgagacagaaactgaaaaggctagtttagcttgctggagagggaatgtctgtgtctctaagtcttaattcttgggcctgaacttgagacatgttggagttttgagagtctgtgtaggttggggtagggctgatggacattgtcccagggaagacggcaggtaagcaccttgtcttgtagagaacacaaagggaagataagtgagccaatcttgaaagctatatgaccacgattcacattacactttgtgtttattccctccttgtcatccttgagcctttggaaatgtctggtttaaatgttgcagcctggcctagctgtgtaatggcatcactggaattgctgagggtcagtgtttatttccttagaatgatagagggaggatagtgctctctgaggcctctgtggattttggtgattatggagactcttaagaaaaaagtgagtattggggaacaagagttgggccctaagtccacccactcccctccacatggtgattcaccaatcactgtcatccttttattaagcaggtggccggatttcttacaaaagcaatcccttaaattggtccgaaatctgttttcctgtaactttcacccacaggacttagtccttcctctcaaaagcacagagaacaatcatcgtaaccattcacattcaccaagtgcttactgtgtgctgggcactttactgagcattgtagtagatcttatatatactattatcccattttacagatgaagaaattgaggctaagggaggtgaaataacttgtgcaaggccagaccccaaatgagtggcaggatttgaactcaaatagtctgatagcagagcccactgtcttgaattctgaaatactacttgtctcagtgacagccccacagaggtctgccgcctgtgacctttcctccctgggccttttttgatccaggtggaacccccaccccatccccttgctgcttctctttgtgcttggagtagaagggaggcagccctgcccagttccttttgccctggggcaatagaaagaatgcaaaaccctagtccacctgacctctggtgacttgttccacttcgaccccccaggacagacagccttgtggaagcctctggaagcaccattttagcagccttcccctcaggaggctgtatttttcctgtctgtcctcaacatgtcttctgccagaacaacaagctcagttttcccttctgataaatctggtcaccctaaatatggggctttgagcaaatgggagcggctggccccacgcagccctcatttcaaaatgcagattcacacgggctgctattttggaggtctggtttctttccccacacgcagtggttttaagtaagagggaagggatcatgacagaatcttggcaggggaaagatgctaggagagaagatgcacctgggcagtctttgcttcccaaagtccccaaacactggcccttcaagaagctggttggggggtggggggagcaggaaagagggtccatggtaacataacactgggaaatacagcctaaccagcccctcctgcagatcagcagtgtgcatgttaaacatttgaaatcctagaagtaaagaagcctaactggttttgtttagcccagtttttccatttaaaaatgtagcctagtaaaattttgcaaaacaatgatgcagagcagagcttgcaaaccggcaccgatggtctgatatattcctgggagaggtctgatttggcctacaaagtgcttaaattttgctttcaattagtcactaacatttcacaattggaatagttctcctaatagataaagagggtattcctcttgaaaaatcagaagatctggaaacactggtccgtattcttgcctgactgtagtcagctggaagccaggctgtggtttttaacttgctgcagcccctgtgtctccttagggcaagacaactatctcttgctctactcatttatgatgctcatcgggttccagagtcccccaagcttgccttctctggtgtggaggtttccttgggtaggctggcctaggtgaccattggggcccattcatccattcactcatgcaacatatactgattgagcttatactgtgtgctgcaccctgtggatacgagatggataaaacagcccctgccctctggattccagcgctggcattctaagattctagttgggaactgcagaacgaggaggagggaggggttgaggagaggggagctggcaaggctacaaccaagcttcctgacttgcagccgcgggggcttgccaaagtgcttgccattctccatcgctttctctaccggctcaccgaagggagccgccactccaacagccacggtgagccttagagacatagccactgacttgttctgtgacttagacgcgttgaggctcatctccgggcctcagtttctccatctgtagaatgacccggttggactaggaaatgatgggctttccttccagggctggcactcagagaggctaagactccatgatcgaggaatgtctgacccagccattctggagctgttccatcgaattccaagcagccccactccctcctttccccatcccggtcaggggcgggcgctggagccagcaggccgagagggccggggcttcccgcccgggaggtggagccgctgctctgcgtcccgcccctccacctggggctcggcccggcccggcagatgttacaactttttcgaattctctcccgccgtgtcccctcgacccgcccaacttgtgcctccctccccttcccctctggggtcctgcccacctccctgcagggagctgggctgttttaaggactccgggtggggcgagaggccgggaaagcagaggagagagaaattaggaggcgggagaaatccagggcaagaaggaagaggggagtcagaggatggtagagagcactttttggaagctgccacgccgcgtctcaggctggccgggctgagccggggaagagggagcaaaggcggcgcagggcctgcgcttaggcagcgggaggcagctcggcgcgggcctgacctccccagagcgccccgctgcggccgagcagatccggcccagccgtccggcagccagtcccggaccagacactggaccgtccccggggggcgctgaactccctcgcagcatccgagccggcgggccggtggtgcgccctgggcgcgcgaggtggtgaggccccaggagcccggcgcgccgggacgcgcgggccggcttggcgatgcacaccctcactggcttctccctggtcagcctgctcagcttcggctacctgtcctgggactgggccaagccgagcttcgtggccgacgggcccggggaggctggcgagcagccctcggccgctccgccccagcctccccacatcatcttcatcctcacggacgaccaaggctaccacgacgtgggctaccatggttcagatatcgagacccctacgctggacaggctggcggccaagggggtcaagttggagaattattacatccagcccatctgcacgccttcgcggagccagctcctcactggcaggtaggcgtggctcaaggccccggggctgggcatctaaaccccaaatcaacccagttgatagatttctcctgccagtaccaccccatgctgggatctgggaaatctcctgttggctgtgtaatcattagtaagtccctcgccctctctaggcctcaattacccttcctttacactgaatgggcttcatcatctttgaggtcttcttgctttgatgttccaggacactcacattccacacaacgtggagacatctggtcatccctttgttagaggaacatggcagcctctgacatttactgctgcttctatttatggaccccgagaccctgagcaagtcatttaatttctctaagcctcagttttcttgtccataaaatggagcaaagaacagttttcatcttgaaaaggagtggcaaagttggaatgagttgtgtgtaacctgcttggctgtcaatatatggcagcctctatgtctcctgagggattcaggtccccatactgcttgatgaatacattgggagaagaccaaggaattgataggtggaagagaaagacacataggataccatgacctgtgtagccttagggtggttacttcatttctctgagcctctgttttttcatctgcaaaatcctcccaagttggctgggagccccaagtagacatgctgcttcctccacaaggaaatgtccacaggcgaggcagcaggattacaggattaaaagagcagggaaacaggaggtgggggtatggaaggcaaactctggccacttaggagaaaatcctttggcagtgctgaagctaattctccttggatggggtccaaggcatgctttctcccaagttccacccaagagccactaatgtgatctcaggaaccagaagccttagtctccctgtttcttagtctcactatttcttggatgggagaaattgaggcaaggactcagggagggcctagtttggtgcccgtgcccaacttcagggtctgtgggagataggattgagaggccaggtgtttggcgggggtcccggagctgggcatcaaatggcgtcctttgttccttcgatctggcacccagcgtttagatccaggaatcagaaggagaacagaagaaagaaggaggggtgtggggtgtgtatgggttggggtggtggtgcaggttagtggtgtagtggtgaagaccaatgttgacctgcagaagagggtggaggagtctgcattcccaagagttatacacaacttagcgtttctgtcctaagaggtgacttttggtttaagtagcggaatgagcagacagcaggagggcagtgctccagtcccctgatctgcgaagctaactgaaggtggccggccagtgcctgccctcccccaccctgcagctggctccatctcattgatgcttacagccctcgttagtgtttgttaacacatccagttgtgttttgtgacactggagagaggcaaagtttctcttgtgactcacttgcaggtgggctttggtgactcttagctggcccatccgctttacaagccagcgctccacagcaccccacctctatgaagaccggcccagttgggactcagggccctagggtgcttctcatatcaaatccaataatttattagcttgattgaggcctggagaggccgttatcaccaaaagattttgagcatgacttgagtggacccaggttcaaagcttagctccactgcttgtcagctctctgaacttgggtcattgctgcactttcgggggacttggttttatcatctgtagaatgggggtggtaatagacttccctgtaggtttttaaaatgagagttaaatgagataatgtatgtgtatggcacatagtgttaaaaatggcagtagtagctaattagagctaacaacaataacagctttaagataaggaaaccaaaacagaaactcactcctgtgctctggttaaagatgtcaggtattcagggcttggcttaatttggatgcctggaggtgagaaaaaggtgtgggattttaacatacttgtgaagttccaggcttcttatttactctgggactttcaagacttgagtaaaggcaagacaccataagcagatcacatgggagccttgaccacagaagggggaagatgggatatgaatggataaatgaggaattcaggatttgcctaaccatttactcctgcctcagggtgatagcctggatcaaggggtcatatgagctcacaggcaggcacttgggagctggtcttaaaaaactgggaaactagacgagtcttagagatttcccatttcaaccaactcctatacgggagcaaactgaggcccccatgtgggaagagatacggcagcccggtttgctgaaaaagagtccctgcttagactctgcttggatttatgttcaagtcctggctctgttcctgaccaccgagcgacctcagttaaggcccttccccttcccttaaaaagaccttaggtcctttttaagatgaggtgagtaaactagagaatgaattgggtcccttctggctctaaaaccctcttaagtgtcattcattcattcatttcataaataattgagtgctctttgaacatcacttgggtgctaggaatagaaggttgaataaaggacagtctcatcacatgtcactgggcgcaagagcatgtgcagacgagtataatcccacggccaagtaagaaaacgatggtgtgtactaaatgctaggggaacccagaagcaaaagtgactaattctttgggagagttatgaaagactttatagcatggataacatttggactgagctttgaagagtgagtaagagtttgcctgggaaagcagggcttgctctaggccccagtgcaagttaatagcttagagcttagggattccgaagtctggagccagactgcttgggttataaatcccactccaactactagccgtgtgagtcaccgggcaactaatttaatttaccaagcctcagttcccttatttggaaaatgggaacaataatatgtacctctgaatttgtggtgaggattaagtaagataattcacataagaggattagtgtaatgccaagctcacagtgagtgctcggtattagctattattattgtcattattaccctgggttcaacttttatctctccaacttcctagctgtgtgatcttgggtgagtggcttagccattctgagcttcaatctcctcatctgtaaaacgacaatatgatctacttccagtgattttgaggattcgatgagataatgcatttgaggtgcttagcacagtagatagtacctggtggttactgttactatttttgctggtagtgctgggaccacagcccacctcacagtggtactggggactggatggccagagcaatggtctgtagcttacctgtgccttctgtgccttcccctcctccccaccaggtaccagatccacacaggactccagcattccatcatccgcccacagcagcccaactgcctgcccctggaccaggtgacactgccacagaagctgcaggaggcaggttattccacccatatggtgggcaagtggcacctgggcttctaccggaaggagtgtctgcccacccgtcggggcttcgacaccttcctgggctcgctcacgggcaatgtggactattacacctatgacaactgtgatggcccaggcgtgtgcggcttcgacctgcacgagggtgagaatgtggcctgggggctcagcggccagtactccactatgctttacgcccagcgcgccagccatatcctggccagccacagccctcagcgtcccctcttcctctatgtggccttccaggcagtacacacacccctgcagtcccctcgtgagtacctgtaccgctaccgcaccatgggcaatgtggcccggcggaagtacgcggccatggtgacctgcatggatgaggctgtgcgcaacatcacctgggccctcaagcgctacggtttctacaacaacagtgtcatcatcttctccagtgacaatggtggccagactttctcggggggcagcaactggccgctccgaggacgcaagggcacttattgggaaggtggcgtgcggggcctaggctttgtccacagtcccctgctcaagcgaaagcaacggacaagccgggcactgatgcacatcactgactggtacccgaccctggtgggtctggcaggtggtaccacctcagcagccgatgggctagatggctacgacgtgtggccggccatcagcgagggccgggcctcaccacgcacggagatcctgcacaacattgacccactctacaaccatgcccagcatggctccctggagggcggctttggcatctggaacaccgccgtgcaggctgccatccgcgtgggtgagtggaagctgctgacaggagaccccggctatggcgattggatcccaccgcagacactggccaccttcccgggtagctggtggaacctggaacgaatggccagtgtccgccaggccgtgtggctcttcaacatcagtgctgacccttatgaacgggaggacctggctggccagcggcctgatgtggtccgcaccctgctggctcgcctggccgaatataaccgcacagccatcccggtacgctacccagctgagaacccccgggctcatcctgactttaatgggggtgcttgggggccctgggccagtgatgaggaagaggaggaagaggaagggagggctcgaagcttctcccggggtcgtcgcaagaaaaaatgcaagatttgcaagcttcgatcctttttccgtaaactcaacaccaggctaatgtcccaacggatctgatggtggggagggagaaaactgtcctttagaggatcttccccactccggcttggccctgctgtttctcagggagaagcctgtcacatctccatctacagggagttggagggtgtagagtcccttggttgaacagggtagggagcctggataggagtgggtgggaataaaccagactgggatgcctgtgtctcagtcctgcctcctcacggacttgctctgtgacctcaggtgacccacatgagcttttagcctcagtttcctcatctgtaaaatgagctctaatgactttgtgactctttggtgtggccctggagcctggggccacggtggagttcctggccggccttgccacttgacaactcctttaaggcttcccccttaacacgggatccctgtggtggtgtttgggagttgcctggaggcaactccaagcctggcccccagctgaagcatggcaatctggctgctctctacagggacccccaagcgctgtgggtggagggcaggggtcgggggggttgaccttcttgggtcttcacatggcctaggccagtcctccggtcagactggtgtcaggcaccgtggtgcaaaattcctcttctggcccctccagtacccagagaaactggctgggccattaactgctgcagcaccaagggtggtagaaagagctgtgaagagcccccaaaccagtaccaggacacctgggttctcctgtgacctggggcacagttcttgccctctaggccttgatttccccacctgcaagtggggatgccagccctggctctgcctccttcatgaggctctggaagactggccaaggttgtggaggagcttgtgaacttgattaaagtgtcgtaacatggaagtgagggatgcagtgctgtctgactatgagcatgtgtgggtgtgtgcatgtgtgtcctgggggcaggtatgagctcacggtcggccgagtgaacaggagaggaggtggacagcctggctaggcggtgggggaatgggagtcctgccacagacccactatgtgacctcaggcacatccctgaccctctctgggcctcaacatcccactatgttcagtgatgatctaagagcacttcccatttggccattctgggctagtgtgcatgtgtgtgtgttggggtggggggcaggctgagtggtagcgaggaggccacgggtgttgcagagcccgcctgccgcctagcgcgcctccatccgcacactgcgttctgcatatctcccttcaggttccagtcggcgcagtgtgtgtaggcgaaagccctgctgtgaatttttaaaatagttatttttgtcactggcaaaggaggcctgttaggactcatcagcttgtggatgagcaggatgggtggggtggggtgggtgcggtatgtgtgggggttcaggtattggttacagagttccatccccactgcagatgtggctgagtccaggagtgagggtctggcctgaggctgttgggtggaggtgaccattcatgctctaagccccttcctcctggccctattctttttaccccttatcacctcccccaactagcatctttccctgcctctatgatgttgattcccagctgtgtcatggggcaggagccaggataggcagaggcctctggattccagtgacctccagcatttcagtctgctcaggagggaggctctgaagaagtaagtcacctgttagggcggtggcccaggcctgacacaccctgggagatgagctgtccgtagttcgcccactcctcagggtactctagctctgctgggtgcttgtcccagctgtgtgggtggggcctttccagggtggcatggagccaaggcttccctgccactccgggcttgcacgagttgtatggaggcctctcctgtgcctgctgagtcagccctgcccgaggcctaccctccagctccagcccccacttctctcccggggcccctgccctttggcaccgcaagtgcaggaccgtgaatggccctttctgctgtcccctaatcaccgaggcttactgcctgtgaccaacctaaaccaagaaagactagctggggatggggctggcacctgttcctggtgccctgagaaggagacttgaccccaggtcttggtccagtctcaaatccagcccagagcttgcctagctgagtcctacccaacccagcgctcagcaaacagcccggtggccccacgcaagcttgagcctgcaacctggtctagaggagctggcggctggcctaggcctgagattggtggagggtcttgggtgccccagagcactcaagcactacgataacaggctcagcctgtggtgacttctgctcttcccagcaatcagcatggctcctgccagccccctcccatctcctgtggcccaagtttcctccagccggggcacctgggtctggactctgtgccaggccgccaactggcactgccaggcaggtgctcgtaccatttgagcacctgtgcttgtggggagggaagggagggcagatcagaggcagctccggtccctcgggccacagatctggggaagtggagcccagagatgcctggtgagaccccctgtttcttccttggctgcaccagatggcagctgatctgccagctgtaggggccagagccagggggcagcctgtccaagctgggccctgccagtagagtcctgggctctggtaacccattccccaagggccaagtgatagccccacacctggatggagggccagtgctctgggctccatctttctcaggaggaagtggaggttctactggggagacttcctgcaagctcttccaggactcgaactcaggtcctctaactgcaaggagtgctatgcagccatcggcccagtagccattgtcctctgtcccatggctctctgcttcactctcccctgcaagagtgcctcctgtgtgggagacctcagggacagttctgctccctgatccctgacttcccccacttcttcatgtaggcctagccttacttactgcaatgaatgaacccaatctccctccacccagaccctcagcaggaccatttctctcttggcccactttccaccaattctgccccccatgctcactgcccttagtgggacaggccctgtggggaccctttggatggcacactttctgtggtgcctgcccaggccctgcaggaccctggggcacttgggcatatgtgtgtgggctgtggaaggtgggatttcagtcagctgtcacaatgccactggggctacaatcacccatgcaggaacccagccctggtcacttttcatcccttctgtctctgtggagcactgcctgtgttcacgtgccaatccctattctggcatgtcaggactgggttcagcaacctccagggctcccacccctggcgaccagcccatagcatggaggcctgctctcgaataccacacgcgtgttgcagatgggggcacacgtgctgcctctcgtgtctgctttggccctggggagtggggagtttggcaggaacagtccccctcctgcaatcatcggctcattctctcagcgccacagaggcacggctggctcctcagtgcccgccaccaccgggcacagctgctagcctcgcgggctcaggggaggtggtgaattagcagtcatgccttctcagcagagtggctattaccctcaggaaggtggggggtgcctgtccgaggcagtgcccacaccgctgagctaggctctggaaggctcagaggggtgtgtgtgtgtgctcatgtgtaagactttcagaggggacttcttcctcttctccctcctcttcttctctcttccgcctctccagccatctctctgctatctggatcctgcagccctcaacttgcccatcccccaggaccgcatgcacagtgcaggccagcaggggagggagagaagagtgacagaaagagagggagctggaaaccagaaaggaagtaaaaaagatgagaaagacggagaactgagaaggaaggatgcaaaagagggaacaggaaaaatgagggagaggggaaggcaagaggagagaagaaaggagagtggaaaggagagatggaagtagggaagaaagagatgacaggagcggggctgtgctggccctgctcccagcagccacagaggctgcccccgtggtccacatcacatacagggagagaggtggccatcttcctgcctccattccttcacaccttcctctgagggacctgatgccagggtcttccccatgtgctctgctcacttctgagcatgctccatttcatcagtgggaatcgggagaggaaacaggggtcaggccagcacccagccacgcaggactgtcccagttcagaacattagatttccattaatacagcctcataatctcacagcatagttgcttttttgttttactgtgaatttttaaaacagcatcatcattcctttggcacccgatgagctggagagccttgtggttcctctccttctagctctagttctttgttctacagaaattgctgcaaactaggcttagacaaggtgatttccaaaccatgagctaaactccagtgcagactaagggaacagtgccctgaagtgctgggactcaagatgatggtgtgtgcttccgtgattcagggagtggtgtgtgaggggagaggacttttgagtttcttgattataatttcccatttattgagcatttatagtgtcagccactgtgcttgtctcatttaatctacagaacagcctggaggtagggaatattattgacccaattatgcagatgaagacacagaggcacggagaagttaggatattcatccaaaatcacatagcccgtaagtcgtggagtcaccctaactactaagcaacactgcctctcctgtccctgtgcaatggcaggtggccttggtggtcactaagggctcttccagcactttcttgtgtggaagccatcccctcctgggggacaggctagagggtctgggacaggagggtggcagtgcagccctcccccacctccccacataggcctgtagcttggccaccgtgttctgtgccctgcctgctgcccactggctgtgcggcccccaggcataggcctctccactctgcctctgaattgcaacgttggcggcagaagcgggaagcatattgtgcgcagaaacaaaactgagtggttttcccttttcccaaaggtggtaatggtgcaattagtggctaagccattacccccctcctcccttgctcacttcccctcttcccctctgccaccctccctctcccaccctccctctcctctcctgggaacagcggctgaatgggtgagctcaccctttattctcccccacagcccactcccaggaagaagggcagaatgggagggttatccagatgtctccagggggcccctgcaagtagggtagtgagtcagggacttcgtggggttggagaataccaacaagcagataacatgtcctgcaagtgagaggactagcaaggcaatgtggagggtcagagcgggtgggctagaatccctgagggtctggatgcctggatccttttatccaacccatgctcgctgggggcaggtgctggcatgaagcctctgcccatcaagctgcgaaatgggccaaggcaccctttttcctcagtggagaggggaaggggtatgcagggtctgagatgccaagcccaagctagagtgatggggtggtcacgggccagctttaaaccttcattttcctcctctagagcctagaaagaggcctcctatttacatagttcccaaaggccttcacagcccttagcccactccatctccacagccttcccctgcagggcatcttcattcccctgttgtgtagaaaaggagctggaggctcagagagggtgagtgacttgcccgtgatcactcagctaataaatgtccaaaggccgggcatggtgcctcacacctgtaatcctagcactttgggaggctgaggcaggtggattgcctgagctcaggagtttgagaccagcctgggtaacatggtgaaaccttgtctgtactaaaacacaaaaaattagccagacgtggtggtgtgcgcctgtagtcccagctacttgggaggctgaggcaggagaatcacttgaacccaggagacggaggcttcagtgagccgagcttgcaccactgtactccagcctgggtgacagagtaagactctgtctccaaaataaataaataaataaataaataatataaataataaatgtccaggaatcagagctcaaactcagatccttagtcttaaactccagtcccttttcttcctaactccaagaccttggagtaagatcttgtggctgtaggtatggctgatgccctgaagagttgaagttggcagggaaggtgcccagaaaattttggattgaagatttcatggcaagtctctggccagtggcctagcccgggtaagccatgctatgctcacctccccacagccccctctcgcctttttttttttttttttttttaccttgactggaagcacaagcagaaactgggacatgagcaccaggagaccagatttccatggtcccgttgggggcatggggttggggagaggttgcagaggagggctctggaggggagcaactgtcacagctgtgagaggtgggggtgagcaggcagtcagggctgttccctccagaatcctggggtgtcctctgcacttctgcgccaagctggagtgctagtgtgatggacaaggtggtaagagagctgaaagagcacgagcataacaagaaagacagaggcagaagcaaaaaaaaaaaaaaaaaaaaacagagggcaacagagagacagttacagagactacagtgatccacagagggagagccatccctgtgaattagccatcatttccctgtaaaccttagaacccagctgttgccagggcaacggggcaatacctgtctctctagagatgaagttgccagggtaactgcatcctgtcattcgttcctggggaccatccggaatgcggcacccactggctgttaccatggcaactgcctttttgccccacttaatcccatcccgtctgctacaagggccccacagttggaggtgggggaggtgggaagagaaaagatcacttgtggacaaagtttgctctattccacctcctccaggccctccttgggtccatcaccccaggggtgctgggtccatcccacccccaggcccacacaggcttgcagtattgtgtgcggtatggtcagggcgtccgagagcaggtttcgcagtggaaggcaggcaggtgttggggaggcagttaccggggcaacgggaacagggcgttttggaggtggttgccatggggacctggatgctgacgaaggctcgcgaggctgtgagcagccacagtgccctgctcagaagccccgggctcgtcagtcaaaccggttctctgtttgcactcggcagcacgggcaggcaagtggtccctaggttcgggagcagagcagcagcgcctcagtcctggtcccccagtcccaagcctcacctgcctgcccagcgccaggatggccaccatcacctgcacccgcttcacggaagagtaccagctcttcgaggaattgggcaagtgagttgtgcctcaggaagtcctggaaggcatggggggcggggaggtcagggtctctagtggggtgtgtgtgcctgcagtgcttggggagcattccttgtacacagatgaaggcaggctgcatgggtttgggggcacctgcctgtgtacagagtgtccagagtcgggcgtgggtatgtttgtgggtgcacagatgtgccaagctagccaggccagtgtgtatgtagggatgaagggttgacagtgtatgccagtgcacacacatacacacaaaatgcacacaagtacacacaacctggatacacacagattcttagagacttagggttaaaaagggattttcctagtcagctgggtccaaagctggaattccttctctagttttgcttgaggtggccatccgccctccacttagatacctccagtgacagagaattcaccagctcccggtagttcttcctgactttagacacccacagtgactgtacagagtggccaacttctccctccctacctcccctttctcagctcctgccaggagtgagggcgtcagtacagtaggggttaatatctgagcatgacaggcttcccgggtgttgggaggtggggagaggaaatcaggaaagctgtagcggggagcaccgctgtttcaggggctagggtatgaagggtgcagtggctctggacaagcaaagttgcccagcccagagctcattttctgccctgatgactgctgtgtagagaaggatgggaggatgaggaaagaggggaggcccttgtgggtggcccagtagggtgtggagtgtcagggagggattcctggatgtccccagctgggtttctggaggatcctgggatgggtcaagggttgggtgcattttggaggcagagtttgccttgtgggcaaaggagcaccgatgccctggttggtttctgctgaggcagcaggagcacggggggaggggccctggaggcaggtgtgtattggtgtgagttctgaatgtgtgtgtactagtgtgcattttgaggagtgatgtgtgtggctgtagaagggcttttgagggaaattgcttgtgacactggggtacgctggtgtgccctgccagggtgtgcaagcattcatgcatgtgcaccaggaagaggtgcttcgtgtgtaaggcctgaaaatgcaagtgtgccttgcaagggtgcatgtgtgtgagtattacaagagtgctgttggctgggttgaatgagaacaagggtgtaaacatgactcattaaatgtgcacatgtatggcaggttagagctgtgtgcacataggaaggcacatgtgtgtgaggtctaggggtgtgtgaggatgctcatatgagatgcggacacaatggtgttcctgtgaggtcttgatatgcacatctacgtgaagactggggtcatgcacacaggatgatgtacgtgtgtgtgcacacgcatgtgtgtgcatgtgtgaggcctgggctcacagggttatgtgggagtatgggtgttataggcatgtgtgagctcatgctggtgtctgcatatgtgtgggaggtggccctgtgactgtatacaggaaggctgcttgcacacacacacacacacacacacacacacacacacacacacagaggctatcctacaggcatgcaccacctcccttgagcacatatacccccatgtgtacgtgtgttcactcttatctgcagactttcagcttttctgaatgtgctttttttgcgggtaggggcaggaacaaaatgtttggggctgctctggaggactgaggctgtctacaaacttgtgcagggacccctctccaggtgttttccagtgctcgcctagaacccaagaattccctgattagccatgaagctgcctttcagggagtgaccaagactgggtcctggcaggactgcgtcatgagtacagtgagatggagttgagatgtgactcaagtgctcaaagtgaaaataaaagtgatgttttgccccaagaggagatggatatcattaagactgggttttgtgggggcaacttggtagagagacccttcgtgagccttcacagagaatttcaggggcaagggagccctggtgtggccatggcaggaaaaccgagggtagcaggcatagctaggccttgtttaatcaatttcagacttcttccttccagaaccatcagactgctcttaaccttttttaggtcacatattccttcaggaatctgatgaaagtctaaatctacgttccccagaaaaacgcacaaacctacgaaatgttgcatgcaatgtcaggagcttgcagggacatcgggaagactgtgtatgagcctaagtttgcagaagcttgtgttagagacaaggggataaagtggactgattccgcacccctgatgtctgtgttaaaaagtccagaccacatcattgaggagcctggggctcctgctctccacagcagcttcagtctgagcatccagtggtgcagggaggggcagtgccctgcgtagccactagggacacaggcgctgtccctcatcacccatagctctgtgacaccaggcaggctatgctacctctttacccccacctgtagtctggagataaaaagggctgtgagcattcaatgagatggtgcatgtagagatgcagcctcgagcctggcacatgacaggcccccagggccgattgctactggggtgactgttgttgttctcaaaggctgggcaaggctgaaagtgaggaatgggatctgcttgtaccttttgtctggagttggcccatccggggctgggaggaggttgaccaaaccgtgcttcccccctggctggcctcttctgtgggaggaagctatgagggtacctgcagggcccatccttcaattgatgatccaccgtccctgccagctgggacactgcagtcaccacccaaaagctaagcccccgttccagaacccacttcagatcactagcagggtgactggaaaaggcagccaggttggccctaaaagggcacatgggagcctttgggtctccttcaaggcgttgggctgcccagcaggagaggagggcaaatccctctggagggcttctggcatcctgcccagtgaggtctggctcaggactgcaggcctttgaggagccccggatagggctggctatggatgtgagagtagctgctcttctccagccctggtgggcagccctctgggaacctgtgactggggcca

SEQ ID NO: 337 - DNA, 2674 bp, Homo sapiens
agcgccccgctgcggccgagcagatccggcccagccgtccggcagccagtcccggaccagacactggaccgtccccggggggcgctgaactccctcgcagcatccgagccggcgggccggtgcctgctcagcttcggctacctgtcctgggactgggccaagccgagcttcgtggccgacgggcccggggaggctggcgagcagccctcggccgctccgccccagcctccccacatcatcttcatcctcacggacgaccaaggctaccacgacgtgggctaccatggttcagatatcgagacccctacgctggacaggctggcggccaagggggtcaagttggagaattattacatccagcccatctgcacgccttcgcggagccagctcctcactggcaggtaccagatccacacaggactccagcattccatcatccgcccacagcagcccaactgcctgcccctggaccaggtgacactgccacagaagctgcaggaggcaggttattccacccatatggtgggcaagtggcacctgggcttctaccggaaggagtgtctgcccacccgtcggggcttcgacaccttcctgggctcgctcacgggcaatgtggactattacacctatgacaactgtgatggcccaggcgtgtgcggcttcgacctgcacgagggtgagaatgtggcctgggggctcagcggccagtactccactatgctttacgcccagcgcgccagccatatcctggccagccacagccctcagcgtcccctcttcctctatgtggccttccaggcagtacacacacccctgcagtcccctcgtgagtacctgtaccgctaccgcaccatgggcaatgtggcccggcggaagtacgcggccatggtgacctgcatggatgaggctgtgcgcaacatcacctgggccctcaagcgctacggtttctacaacaacagtgtcatcatcttctccagtgacaatggtggccagactttctcggggggcagcaactggccgctccgaggacgcaagggcacttattgggaaggtggcgtgcggggcctaggctttgtccacagtcccctgctcaagcgaaagcaacggacaagccgggcactgatgcacatcactgactggtacccgaccctggtgggtctggcaggtggtaccacctcagcagccgatgggctagatggctacgacgtgtggccggccatcagcgagggccgggcctcaccacgcacggagatcctgcacaacattgacccactctacaaccatgcccagcatggctccctggagggcggctttggcatctggaacaccgccgtgcaggctgccatccgcgtgggtgagtggaagctgctgacaggagaccccggctatggcgattggatcccaccgcagacactggccaccttcccgggtagctggtggaacctggaacgaatggccagtgtccgccaggccgtgtggctcttcaacatcagtgctgacccttatgaacgggaggacctggctggccagcggcctgatgtggtccgcaccctgctggctcgcctggccgaatataaccgcacagccatcccggtacgctacccagctgagaacccccgggctcatcctgactttaatgggggtgcttgggggccctgggccagtgatgaggaagaggaggaagaggaagggagggctcgaagcttctcccggggtcgtcgcaagaaaaaatgcaagatttgcaagcttcgatcctttttccgtaaactcaacaccaggctaatgtcccaacggatctgatggtggggagggagaaaactgtcctttagaggatcttccccactccggcttggccctgctgtttctcagggagaagcctgtcacatctccatctacagggagttggagggtgtagagtcccttggttgaacagggtagggagcctggataggagtgggtgggaataaaccagactgggatgcctgtgtctcagtcctgcctcctcacggacttgctctgtgacctcaggtgacccacatgagcttttagcctcagtttcctcatctgtaaaatgagctctaatgactttgtgactctttggtgtggccctggagcctggggccacggtggagttcctggccggccttgccacttgacaactcctttaaggcttcccccttaacacgggatccctgtggtggtgtttgggagttgcctggaggcaactccaagcctggcccccagctgaagcatggcaatctggctgctctctacagggacccccaagcgctgtgggtggagggcaggggtcgggggggttgaccttcttgggtcttcacatggcctaggccagtcctccggtcagactggtgtcaggcaccgtggtgcaaaattcctcttctggcccctccagtacccagagaaactggctgggccattaactgctgcagcaccaagggtggtagaaagagctgtgaagagcccccaaaccagtaccaggacacctgggttctcctgtgacctggggcacagttcttgccctctaggccttgatttccccacctgcaagtggggatgccagccctggctctgcctccttcatgaggctctggaagactggccaaggttgtggaggagcttgtgaacttgattaaagtgtcgtaacatggaagtg

SEQ ID NO: 338 - protein, 424 aa, Homo sapiens
MVGKWHLGFYRKECLPTRRGFDTFLGSLTGNVDYYTYDNCDGPGVCGFDLHEGENVAWGLSGQYSTMLYAQRASHILASHSPQRPLFLYVAFQAVHTPLQSPREYLYRYRTMGNVARRKYAAMVTCMDEAVRNITWALKRYGFYNNSVIIFSSDNGGQTFSGGSNWPLRGRKGTYWEGGVRGLGFVHSPLLKRKQRTSRALMHITDWYPTLVGLAGGTTSAADGLDGYDVWPAISEGRDRTEILHNIDPLYNHAQHGSLEGGFGIWNTAVQAAIRVGEWKLLTGDPGYGDWIPPQTLATFPGSWWNLERMASVRQAVWLFNISADPYEREDLAGQRPDVVRTLLARLAEYNRTAIPVRYPAENPRAHPDFNGGAWGPWASDEEEEEEEGRARSFSRGRRKKKCKICKLRSFFRKLNTRLMSQRI

SEQ ID NO: 339 - DNA, 349572 bp, Mus musculus
  misc_feature (1)...(349572): n = A,T,C or G
cttcaagtccgtggttctttggcctataggagtagtcctgtacaatacctgatgactttcagaaaaccatttcctttcttcaccctaggttgcagaaatggatcttaggacagcaggcctgcaaaacaagtgcttttacccaatagaccatctagctggctcttgtgacacacagtctcaggtagcccaggttggccaaggtgtcccatgccaaggatgagcctggacttttggtcttcctcattcaccctctggagtgctggcattcctgtatgccaggactccattttaccaggtgcaaggagcaaacctagggtctctggaatgctagaccagtactctacctactgggttacattcccagctactttgattgacccagaaatgctgattttgagctcacatgctccacaatgttaaagaaatgtatttctgctgttttaagcctccaaacttttggtaatttgctatgatagcaaattatcagaaaaattaattaacagatgttctgatattgtaatttattattattattattattatttttactggggtttgctacacccaccttgttgacttaaaatatctattaggagtttctaccccacttcacaccatactgttcccagataaaggatacagaaacactggaagataccactcaaatatttagatattaaaaactatatagtagtttagatattgacaaactatatagtagttagttaagacaatgggcatggtgatacatgcctttaattgcaacattcaggaagcagaggcaggaagattgctgtaagttcaaagccagactagtatacatagtgaattctaagtgagcnnnnnnnnnnnnnnnnnnnnnnnnnnnnnnnnnnnnnnnnnnnnnnnnnnnnnnnnnnnnnnnnnnnnnnnnnnntgtagggcttagtcctcagcactgttaaaaaatagttaataccaataaacattagaaacgcagaaccaggtgctggcgagatggctcagcaggtaagagcactgactgctcttcctaaggtcctgagttcaaatcccagcaaccacatggtggctcacaaccacctataatgagatctgacaccctcttgtggtgcgttagaagtcagctagggtgtacttatgtataataataaataaatctttgggcctgagtgagctgggttgaccggagtgagcagaagtcctaaaaaattcaattcccaacagccacatgaaggctccaaccatctgtacagatacagtgcactcacatacataaaataaataaataaatattaaaaaaacgaaagaaatgtagaatcagaaactaccaaggatgatgaggctaagatccccattggaacaagtaaatactaaaaaatgataaaattgttttggaaaagagtttttaaaaacttataattattcaatcaaaactcagttgctgagttaaatggaaaattaggctcaatgaaataatgggagagagaaagttgaagaattcatttgaaatttagcaaagataaggagctggagtatgtgaaggtagctgagagacggggaagggaaccgacagatgcaattagctgagttccagaagaacagaaccaagggaatgagcaagaggtctaaatgaagacataagagccaagcgttctctgggggttatgaaagatttaaatccacggaaatgtaaagggtatgaggcaaagaaaagccaagtcccaggtgtagaaataatagagagtttggaacaccgagatcctgaaagtagatacggcaacatagttagaccaagagctgagcatttcatcttcaacaaccggagcttgacttgagagtcgtagctccaacctgctgagactgaggcacattccacaaaggcttggcatcttgcatcatctcatcctctgtcaaggaagggctaagggtagatgttttcagatgaatgaagctcggggtttaatctctcttgactctttacaaagtaatttagaaggacaaacttctggaaaagatgaccctagaggaacatataaaatgcaataaggagcctaaacgcagaaaagcactggcaactgtattggcaaagctttcaacattgtgtaataatagcatccgatgctgtagttagagagggtgggtcagtgaggaggagggaagcagggctggggggtgtagctctcttgcctttctcttgtgtggctccaggtttaattattcaccatcacaaatgtaattcagaatgaaacttaatggtaatgccgtataaggaattttttaaaaattaaaacaaagcacaacccaacaacagtgttctacctagacatggtggcacatgcatttgatcccagcactcaggggcaatggcagggatctctgtgagttcaggggcagcaaagctacatagcaaggcttatctcaaaaacctacaaacagccaggcatggtagcacacacctttaatgctggcacttgggaggtagaggttggtggatttctggttcaaaaccagcccagtctacagcctgagttccaggacagccagaatgacacaaagaaaccctgactttgaaaacctacatcagaatcaaccaaacaaataacaataaaaccctgtgttttagactttttttttttgtattgctcagaagcagggatgtaactctgacttagaaccttaggcccacgtaaagtgtcaagtgcaacctgcaaaagactagatgtgcagaccggcatgtcaaccagaagggaagaaacccagtaagaaggcaatgagatgaacacttcttttttaatattaattattttttacatcccatattccattccccagcccctcatccaccctccaactgctccatatcccacccctcctccccaccccaccccgtctccacatggatgcccccctccccacctccctacctgacctctaaactccctggggcctccagtctcttgagggttgggtgcatcatctctgaatgaacacagacccgaaagtcctctactgtatgtgtgttgggggcctcatatcagccggtgtatgtatgctgcctggttggtgttccagagagatctccggggtccagattaattgagacggctggtcctcctacaggatcgcccttctcctctgcttctttcagccttccctaattcaacaacatgagtcagctgcttctctccattggttgggtgcaaatatctgcatctgactctttcagctgcttgatgggtttatacttcttaatacaaactctcaaaaagaagaagagtgcacagtattgtggggcaagtgtatgcatcttagaaatgatgattttgaaagaggcaatcactcaagcagtcagtcagaaggcagatgttttgtcagttgaacaaataatcatacatctaagccttggtattttattatttttagcgtgccagactccatatgtcttcaaaatgtaattttgaaggtcttcataaaaaatttacacgggtcttcaaaatgtatttcctaaaacctcataaagccttagctacttttatacaaaagtagttatctgcaagccatgcattgttatttacatctgtaactatgaaggagttacagagaccaagtttggaacagagactgaaggaatgaccatccagagactgccccactcattccgtatacaatcacaaaacccagacactattgtgaatgccaacaagagcttgctgacaggagactgatatagctgtctcctgagaggctctaccagtgcctgacaaatacagaagtggatgctcacagtcatctattagacggagtacagggtccccaatgaaggagctagagagagtacgaaaggagctgaaggggtttgcagccccttaggaggaacaacaatatgaactaaccagtacccccagagcttcctgggactaaaccaccaatcaaagaaaacacacggagagactcatggctctagctgcatatgtagctgaggatggcctagttggtcatcaatgggaggaggggcccttggtcctgtgaaggttatatgccacagtattgggtaatgccaaagccaggaaatgggagtgggtgggttggggagcagggagaagggggagaggataggggattttcagaggggaaactaggaaagaggataacatttgaaatgtaaataaagaaaatatctaataaaaaaaagaaaaaagaaaaaaggcatgtgtttccataaaaaacaaaaccgaatgatagttattttttcatatgatcacaaacagcttaatttttcgagatctttctgtcacttgaggaatgttgctaagccccagcgtgaaaccagcttctccaagtctgtagccatttcgacatgtcttcctgggaaccatagccactgggggacggcagcattcactgataaagccgcataaacttgtggtaggatgtattattctacacagtggttttcccagacgggatgtagactcacagaattctaccagtcaactcaataacctgcaaaccagcagcttggtcttaactcgttgcctgtttgtgattacccttcgtagttgaagcttgtccttccttggtcttcattcttgatgagcccagcgatgaccacctgccaaacaccctccactatcaaatctaagatgtcaaaggacaaaacgcaacagctttcagaagaaaagccacaagtgactgactgcatggtttctgactagacatgaaaccgatgggaaagaactgattgttttagcgaataatgctgtgaagtttctcagagctatccttgcccaccaaccccacccataacaacctgagatccctgggcaacgctgatgcacattgcacatgcaagggtagatgctcacaccctagctaagtctacaaaagatctctgtgtgtttttaatatatagtttcttctcaagtgaataaaaaaaagggggggggataaaagctatcaaaatgtacaaacgcaaaaataaaactccagcccaggggtccctaacccttgctgtgtttcaggatcatctgaagagcttaaaaaccaacccccacatggcccccagtattagttacgtgcctgggttggtgggtcctcaggtgcttctctgtgtagcagtctgggaactgatggctaaggatatgggcctcaagttaacttgcacgtaagggtcaactgggcttctatggtaaccgctgatacccgccctcctccaccgaccccatgaggacaacccgccctttggtccacttttaaagctctccagatgccccttaatctgtatcaagtgtccaagaccattgttgggggggggagctggtactcagatgacagttttaagtggattcttttatgactaaatggtctgtatctctgggtaaccaaggtaacaacaacgaaatcacaatcaagtaaaatattttcggtcatccacaatgtttttacttagcagttccttagaagacagtaaggtttcctttacagatccatatggtaaataaatgttctgtttgagcctgttcacagaggccgtcgaacaatgctacagatcataatttcataagctgtccgtcctaagtgacagatggcaaatttcctacgtgtagttcaatataaacgtttgctggttctttgagaatgtagcacatgcgtgcactattttgatcataatcacgcctcacttctaatatctgcccctcagtgactgtcaagggcatgacccagactgtgggtgggtggcacagggctgtgatgagaatagggagagagcaggagcctgagggatttcctgagacagtctgacacccctctagagcgtctggctgactgtgtctgctggatgacttttcgggggagagatgaacagatgtgtcttcatctcagataggacacagagaaacagttcctctgatggagcttagggaaccagtgcatttattaagattactcaaaggagctcgactgactcaaaatcagctgcaccctggaaaagcccgtctatgctatcagaaggggacatccctggagctccctgcccaacttccaggcactgctggtcttcctttcagcaatttactgcttgtctgaggcagtctgaggagcctccctcttggaaagaatgtttcagtttggagagaagagttgttttaagtcagcctttttcttttctttttcttttttaaaagatttatttattattatatctaagtacactgcagctgtcttcagacactccagaagagggcatcagatctcctgaaggaaggttgtgagccaccatgtggttgctgggatttgaactcaggaccttccgaagagcagtcagtgctcttaactgctgagccatctctccaggcccgatactttttcttaaaatttgttttatttatacgtatgtctgcaagagtggacacacccgtgtgaagacagaagagctcgttcgagcccttggatctggagttgctggcattagtaggaggatgggggcttgttactgaaccacctctcaagcctcccctaacagtttcctttcaggaaatttaaagagtccatcaccccgttccccttgcctcaaaacacaatgtaaactacaaattttgacaaaggcctgattgcagatgttgaaaagcaatgacttccatttatgtgggtcataggtacataggcacttagaagggcatcaaaaatgtgtgtgtgtgtacacgtgtgtaccttttattaaaaagataaataaactaggtttggaaaattgaaaattcttggcataaaaaagcccaggaaagcttgtctaagacatgttctttcccaaatttttgtttctcagtagggatcttgaggctcctgttaggtcccaaacccaggacaaatggctgaggtgcccattcaacatatcaaaattgacctgagggccaggttctcccagcattcctcagtccctatctgttacagggcgtggctggcacaccctactccataccctaaagttctctagcccagaggattagacttcccttcccccaactgcccttccctacagccattttcgttacctggtcttcttatctactctctaggccctggctgactctcttggctggaagctgctctcctctctctctcttcccctctctcagggtcacgtccactctggactctcccagatgtccctgcctttggctatgctctcctacatctatataataaaccttctccgccatacttaggagcaatcctctctctctcctccagttcctccctccctcccgcctcggtctctgtctccctccttccccagctcctaagcactgtgtggtcttaatggcttttgaattccatcttaggcttccgagcagagtgttgattccattgtggctgacttcgaaggaaagtcactactttgggacacattgcaatggaggaaagagagttgggggctggtgcaacatccttctttttgatttgcaggtgcacagcaggtacttggtcattaagctgggacagacaagctgaatcagttgatttttaaccacccagacagtactagacactctggtgctttctatttaaaggcaaacaaaatgttcttcctgttttcatttctaatttaccaccgcactcaacatttaaatttaaggaacaaacggccttcctttttgttttttttgagacagtgtctttctttacagctatggttgtcctgaatttaccatgcagacctagctgttcctcgaactcacaaagatcttgtctctgcctcccccgtgctggaattaaaggcacgggccaccacgcccagctccaaggaaaagacttctaggagtggcaaatttctcttatttaaagtagcctcctgcgttcctgaacatcgaaggattaaatgaagggcttgctagagaaactccctatctggaacgtgggaagattcctacggtggctaataagacatctccatcgtttgcatatgtaaaggacaaacttaaactggaatttggtatttcacgttgtgcctcacaaaaaatgagcttttatcaaagaactaggcagccgggtttcaagtgggtgggtgtgtactcagcgcgggcgcggagttggttttgttcccagtagagttgactccagcaatggcgactcacggccacaccggggcagcctctcctaggctggccgcccagccaggaaaatctcttgggcgagctgaagctgttagccaagtctggcctgccatagctgccaagaatttaaagggggtctagaaacaagcatcgtcgctctcttttagagctcctggagactctggataggaagagaaaaaaaagagagagataaaaacggacatagtggctttgttgttgtttcacggggtcttcatggtcccccaaggtccagttcaccgggtcccaaggcagagagaagccgggcaagaggagggtcagcccggcaggcccagcccgccagggcgcgccccagctcagtgctctgtgccgggtgannnnnnnnnnnnnnnnnnnnnnnnnnnnnnnnnnnnnnnnnnnnnnnnnnnnnnnnnnnnnnnnnnnnnnnnnnnnnnnnnnnnnnnnnnnnnnnnnnnnnnnnnnnnnnnnnnnnnnnnnnnnnnnnnnnnnnnnnnnnnnnnnnnnnnnnnnnnnnnnnnnnnnnnnnnnnnnnnnnnnnnnnnnnnnnnnnnnnnnnnnnnnnnnnnnnnnnnnnnnnnnnnnnnnnnnnnnnnnnnnnnnnnnnnnnnnnnnnnnnnnnnnnnnnnnnnnnnnnnnnnnnnnnnnnnnnnnnnnnnnnnnnnnnnnnnnnnnnnnnnnnnnnnnnnnnnnnnnnnnnnnnnnnnnnnnnnnnnnnnnnnnnnnnnnnnnnnnnnnnnnnnnnnnnnnnnnnnnnnnnnnnnnnnnnnnnnnnnnnnnnnnnnnnnnnnnnnnnnnnnnnnnnnnnnnnnnnnnnnnnnnnnnnnnnnnnnnnnnnnnnnnnnnnnnnnnnnnnnnnnnnnnnnnnnnnnnnnnnnnnnnnnnnnnnnnnnnnnnnnnnnnnnnnnnnnnnnnnnnnnnnnnnnnnnnnnnnnnnnnnnnnnnnnnnnnnnnnnnnnnnnnnnnnnnnnnnnnnnnnnnnnnnnnnnnnnnnnnnnnnnnnnnnnnnnnnnnnnnnnnnnnnnnnnnnnnnnnnnnnnnnnnnnnnnnnnnnnnnnnnnnnnnnnnnnnnnnnnnnnnnnnnnnnnnnnnnnnnnnnnnnnnnnnnnnnnnnnnngtcccgggcggtgggtggctggttctccctcttcaccccggaggtgcgcttctccggcctgggctctcggggtgggcagaggccgcgtgcgccgctgccccgcgagtctctttcctccgcaagctgcgtctctcgaggctgttgggcaacttttctggaccacgatcctgcagcccggagtccgtgacgtgtgtcacgtctaggtagccgcaggggtctttgcgtagtgcaggggatctgggggctgccgaggaacctagtggtgtctcctccccctgggacttttcttgctaatgggcgctcggtagcggatgtgtgcagatcccggcgagagcgagggacacccggagagttgcgtgcggccgctcctgggtcttgcaaagtctggagctaggattgtgcgttccagagtctcctattttggtgtgtggaggtgatctagggaggaggcaggtgctgcaggaaacttaggggaagcttgcagccctgccatttctctccagtccagagaattcaaagcccggcatctctggggtgggtggagagaagaaagctccattgatctcctttattaataaacgaatgaaataagccacaccccccaaacggttggtttgactggagagggctttgtttttaaaagcctcactcgctcatcgcggtccccactcccccttttgaaacgatcctgctaaatcactgttcagccctcactcgaccagccattctcgactcttattggtgtgttgctctgccaaaaaggggggtgggaggcctgtcgcgggcgcggagtgacaggcaggctgcatggagcaggtaggagtggttcgccatctggcggggtgcgcgcccaggtctggctcccctttcgagaggtgaatttacaacccatgaagcattactcagcagggaggtatttcctatcctggttgcgcatttcatgaaaagtggatgtctggaaatttgggctttctcgatttctctttcttaccctccctcctttctttctgaggttccctctttctctggtgatgggggtggggtttaaagagagtctattatctgagacaggctcacgttatggctttgctttcgcagcttccctagtggtatggtgtgtgtgtgtgtgtgtgtgtattctacctaagtgtggaatgaaattggtattttgtggaaggcagggcgtgtaggggttgattttatcttttgatagagctagataggcttactgggctgcttgtgatcaaagaatgatcacaatgcgagtaatgtgtgatgtgtttttgattatttgccatggttgtgtagaataaatttgtgtgtgtgtgtgtgtgtgtgtgtgtgtgtgtgcagttacctggagatgggtgaaagtagaattgttttgtttacctaggggattcgcctcctagctccttatctggtgctggaggggcagtcagatctcttggaggtgctgagattctgacgttcctaaacaaagggcttcctgggtgaggtatcaagggagatgaagacagctgtgtttcatcttagggtctctttaattttttaaaaataacgtgattatttttaaaggctccttgaaagaaatatttcgagactgtttttggaaaatgcatctgcataaaggaatcttttctgtcatggtccgtcccggctttgtttatgatggaagccggtgtcagaatccacctcagggcacatcttgccactttcgccttagagaatcactgttgatcttgactggtgtggggtgtgaaaaaacgaagagcacagacaccaaaccgagtgtgtggagtgtgtgggggcttgcctgtgacgcttccctcctgcctgttaccagagggactgactgtacagggaagatcaaggagtgaggaagacacaatttatctgtgtcttgctttgctactaatggttctgtttagttacacacatcatatatgacacaaaaataagcctcacctacctttttcatttttctcttaccaatagaaaaataaatgcctccatatttttacggtatctgtttggtatgggaggtctctctctctctctctctctctctctctctctctctctgttcaggggtccctttgaagacagacagaatgcctttgtataatattaatatcaaattattacatgtaattggtttgtcgtgtctccagaattagtctgtaagcaaacaaatgggcatcattaccaggctctggaagtggactgcccaggcacctcaggcttgtcaagttgtgttagatagggtataccagtgggctgcaagtatgtcatgaaggtgtttgtttagctgcagagaggaatccacttgtaaacctctcggcaagtggagggtacccaggagtacccagggttctcttgtaagtggacttgtgtttatatttgatgatggcagaaagcattttgtatttggaatggacttactcacgttccatcttataaagcaatggtgagctctgtgctgctattagcacggtgcaaatctggaccatagcgggatggcagagccaagcctcggccgcttagggtcatcagcctgaggtctggctagcggacagagtgacagtgattgcgatgttagctttgcccccgtgggcgtacaggctacttaacttctgccacgcgttgcagctgaatttctttgggatatgatttagaaatcatatccactctgattcaaatcatgtcagtttcaggaaccaaaatcaaaggctcccgtccaaaggagtttgggtgctgaagggattaggtaaagaacagcggttcttattcacggcccagggtcagatttgggtttgaatcagatcagtttggacgagtttctgtaactggcttgggtccttgaagagcctttttcttgtttgtatttaattatggccatctgtagtccgcgttggcatggtttactcaggaatactattgttactctcttgaaatttttcattacacctgagactggtatctttttgggggggaaagggggtttctattggataatatatcaagagtttgaatgacagccttttgaaaggattagctgtgatatcccagcacttagggaggacagtgagcttgaggccagcctggactaaatgccaacagacaaaccaggaaacaagcattcacaaccccaaagaaacaaaatgatgggatgtgtcacttaacatattttttttggtggctagatgaggcgatggcttgagatggaacttgggatgtatctctcattccatacaaacaaggatacgcatcgagtactaagccttaagcatatgccatctaacttatgcttcattagagacccgagggtgtgctgttatttctggctgaggaatggaagctaaggagcgcttaaatgaaccgcgtgaataatattccggtgggtgaatgggcctgttggacccagagccctacttcttttatttttacttttttttaatgcttcttttcttttttttaaaaaagatttatttattaattatatgtaagtacactgtagctgtcttaagacactccagaagagggcgccagatctcgttacagatggttgtgagccaccatgtggttgctgggatttgaactcagggccttcggaagagcaatcggtgctcttaaccactgagccatctctccatcccccagagccctacttcttaaaggaagatctcccttttctccaaagcatcttgaaaggctctcacagctagatcattcatgatagtgagaatgagctatacgtcatggcgttgcattcaaaccctcactgaccaaaatggcctactggctctcattagtgtggtccccatactgtgtttaagcttgggagagtttgtgaaaaatggcgagagacctggcttctctgggtctgagagtagctgtgtgtgcctctcctgtgtggctgtgtctgcagttaccgcagtctgagctcttctctattgccttaaggggtctctactgatttgtctaaaagtataaacttgctaatgaacacttaagggcagcttgcctgtagatagcatattggtttcatcttaagggcacagccatcttaagatgcatcatcattttctatgccccaaactaatactgttgtccaagtaagacatgctgtcagttttaggaagtgtctttatttcacagatgttaagatgtttcggagctgatgagttttattaattagaaaacccctgtgacttactgtaagctttaggctggcttcagaatgtgcagtcatggaacttttccccctactgtaataatgccgggatgtttgtttgggcttgaactcggggcgagttcaagcaaatgcttctccgcagagcttgcagctccgggttagcactttgaggaccagtttctgcatctgtatctgagcaagggttagagggagagaaacagtctttgatgggcatttgtggaggagaagtcagagcctccgtggtgcctctcaaacagccagctgcaagctcatcccggcagctgtggaaggcgttcaggttcagagtgagactgctttacagtgtacctaatgtttgtgacctaaggtgtgggcacttccagactgtattcccagtggcgtcctccctagtgctgtgtcagggttgccatcctcctaggctgtgaggcatttgctaaatgccgagaaactgagagagagattcggctttgcagtgccatttaaaaactttgttgtttgtttgtttgtttgtttgtttatcctagagctagaagccagggcctgtgagacaaaccctttcccacttgtgagcctttccatagtctcccttttgtcagtgagtaggagattggcaaggtggaagctagctaggctacatagtaactttggctccccccactcccaccccccccacccccgttttttgagacagggtttctctgtgtagtcctgtagtcctggctgtcctggaactcactctgtagaccaggctggccttgaactcagaaatccgcctgcctctgcctcccaagtgctgggattaaaggtgtgcaccaccacgcccgcgcggctttttctttatagtacattgttgtttgtttgtttgtttttaaagatttgtttattatatgtaagtgcactgtagctgtcttcagaccctttttcttgctccaaccacactagctctctccagcccaaagatttattcatttattatgtgtaagtacactgtagctgtctccagacaccccagaagagggcatcagatctcattacagatagttgtgagccaccatgtggttgctgggatttgaactcaagaccttcggaagagcagtcagtgctcttaagtgctgagccatctctccagccctatagtacaattttttttttccaggaagcttgaattaatgttattatggaaaaagcagttgtcttgactggaggaataaaataatttgttgcaaggactgaaaacagtagcaaaatgggaatcctgagatgatagcagtttctttagctgccaaggagaacacagatatcttatggtctagggcatccctgagacagtgggtattcctgttactgggaaacgggtatcagaaagttggtttcgggaatctgggagacttctataggcttactgtgttcaaaagaaaaaaaaaatgtgttcaaggacgaaatttctgtgaatggatgaaatgacttgcgttctatactgtaaactggtgaagtagtttgcctaggaatcacatgccttttttttttttttttttttttttttttaaagatttatttatttattacatgtaagtacactgtagctgtcttcagacacaccagaagagggcgtcagatctcgttacagatggttgtgagccaccatgtggttgctgggatttgaactctgtctggacctttggaagagcagtcgggtactcttacccactgagccatctcaccagccccaatcacatgccttttaaagtgcttaaagttatgaatcattttagaatataacattattacaacaatacatgtgaattcctggtaaattagaagaacctgtgttcatccatgactcacttaatcacctttctgccttgtgtagtgtttcaaatagcataataaaaccaggtgatgcctgaggccctgggttggatccacagtcctgggaaaaaccaaccccaaatttaaatggctctctgtgacagaatgaaagcgtgttactttacctttaagacattttcccccactttgagttaaaagataaagctaaacagattttgttgtccttaattttgttttgtttcatttttgagccagggtttctctgtgtggccctggctgtcctggaactcagtttgtaggatcgggctgaccttgaactcagaggcctctgccttcctaggtagtgcggagattaaatcacgtgataccaccgcccaacaaattttgnnnnnnnnnnnnnnnnnnnnnnnnnnnnnnnnnnnnnnnnnnnnnnnnnnnnnnnnnnnnnnnnnnnnnnnnnnnnnnnnnnnnnnnnnntgctgtaataactaatcccatgctgggattaaatgaagtgcgttcgtgcggaggatgaaccgaaggttacttcagttgttacaatgtttctcttacagctggcagtacaaacagatactctcgctttagctttctgactacaggtggcaatgtttgtactgtttcctgttactttgagctctgtgctcgttggtagaatatggaaatgagagcataatttagagattagatatatagaaactagatttagaaaccaatatattctgtaaaaaaaaaaaaaaaatcagttatttaatgaaaacatccagagggcagattctcagtggatacagtagcagagaccatcaggtttctgggtgttttcaatgttatccttactcagggtgtatacaaacaatttcaggacatgtcccagtgcacagaggtcttttctgccccagttcttcctcatctgctgctggttgtgtgagcctttctgtaatttcttctcacttcggaactggttaccaccgtcacccctaagtcttgcttgctaaacagatttttttttctttttcttgaaacatagtttcaggattatttgtatcctggtctagtttctaatttaatgtggagcctgggataactttgaacttccagtcctcctgcgggattctaggcaatttatgtagggatcagacccaaggctttgtttatgctaagtaagcactttagcaactgagctttagcactagccctgctaaagagattgcttcttgattcccagtgcatggctatagctcaggctctaactgaagctggtgaatgcacctgtctagacttctattctagtcatttaagtctgctctcaattcaaatagcccaactgctgactgttgcagtaatactccaagtgagagaagccaccctccccaccaccatcacatgtgacttgttggcagtcaggcatcctcagaaggagtgtggatttattctcttgatgtcttccattctccaagtgaaaagggcctctcagggatgttttcttttggttgaaagaagctgtgatgtgctgtccatctggacttgggacatgcaagggctcattgagacagtggtcccacaaagaaggacatatacactgtggggaatctcctgctatgggtgtgagtggcatccagccagttccctgatacttggtcagggctctagggactagaggttttcagccagctgcagtcaggtgggaactgtgcttgaatgcttctggcatgtttctgcttcctgtgtcccaggcagagggcatgtgccctgtttgattgtgtttcattacatagtcctgcctgtcctagaacttgctttgtagaccaggctggcattgaattcatagaggtccacctgcctctgccttccaagtgctaggattaaaggtgtatgcagccactgcctggctacaagtgtttgaaaacaaagataataagcagatttttttacttatttatttacaatgtatgtgtgtatgtgcttgtatgggcgttttgactgcgggcatgtatgtgcaccacaaatgcctggtgtctgcagagaccaagaagagggcattagatcccctgggattggagttacagatggttgtgagatgccctgtgggtgttggggacccaacccaggttctttggaaaaaccatcttcccagccctagttttatatgcacattttggcatgagtttgagatatcacctctgaagggaatctgaattgaagagtttttattggatgtattagttgtatttatgtatgaattttgcgtctaagacctgaacccagggtctttcttgataagtgctttcccactaagctcacccctccatccctgacttgtcttttatgtttcttttcccctcttctcccctcccctccaagcctgcttcccggtaccctgggggctagctaacccatggcctccttgcaaggcaagcactgtcctcatgagctggatgcccccagttcctgacttagccttgctaactctagagcagtggttttcaggggtcacctatcagatatcccacatatcagatatttacattttgattcataacagcagcacaatcagtgtcatgaggtagcaactaaaataattttatggttgggggtgggttaccacaacacgaggaactgtattaaagggtcgaagcgttcggaaggttgagagccactgttctagaggatgcatgagttcagtgactctttgagctgacctctccatggtgattcgataccatcaccatgggccctagggtaccaccttcctgctgattcttcagaagctggcatttggcattcctgccttgcagtcatgtcttagcttccagtgaacgttaattgaagacgacacatcgagccccgggtgagagcttccctggcttcacttccaggaggaggcgtgagaagagttgagcagtcagagttgtgggtaggacgtagcactgaagaatattgattaatttggagatgatagtaataacgtcattggaatgacacctagagacctataaaaactgatacaatagaattctgttgtttaaaaaaaatttatgcatattaaaagtgactagggatatcccagcaggcgagtggctggatagatctaactttgagcaaaggaatcacagataattaaaaaaattattttctctgttacctgcttgtattttgtttctatgagatactttcttttttcttttttttttcctttataagtttaaaaataaaggcagaactgtggcacttgtgactacagttcataagcacctattatgtgttttatgaataactaaagagagaggaacttgaagactctgaacacaaaagcaatgacagagagatggaaatgacctagatgggtccctgtaatgcacacgtagccgcaatcacagcctgtatttgagcaactgtgtccataactatgtatgattactagaagttaatctcaaatttaacactgaaggagataaaacacatgtattaaggaaagtagaaagaactccctccccacaccccaagcctgtacttcagggttcaggtagaagaactgagattgctttggtacgaatatggatgcaatatttgctcagttggacacatgtttaccaaggccctgccttgtgctctttaccaagggtaccaaggtcatctctgccagccaggagctccccacgagatgggaggagaaagggtggtaagctggatatttttacagatgttttctctactacaacacttgatctttgtatttctattctatgcatgacagttgcatgaaaatgacttaattctaatctcattttatgttctctgaaagtgttctgtgaagattaggggctgagatctgacttgagtctgtctttgtatttgttttcttaggtcttaataggaatctatttcagtccatcggcctcgctcacttagttttaattacattttggattttgatgctcagctggccttgggactcaaaagccaaagtgatcctcctgcctcaacttcccaaataactcgggcctgcatgcaccaccacatcctgcaagtagtgtcctgttctaaggatgtgtgcaccacaggattctgctctatcagtttgcataaatatctaagtggttggaagctctttattttacctttcagctaatgtccttttaagtgtcgggtgtgacctagagagcgtcccttcccaaacaaaagggtagagctgacaaatactgcactcttctaatctgagacaaatcagagccctacctctgaaagaggatgcatctgccttccagtttctgtgtgtagattctgtttcccctcctagttccccagtctcccacttacaggccacagttggcagtgtcatccagttttggggtctgagttggccagtctctaattttatgtcatgatacttaagcatgatggcagattgctgtagctgtccccgggactgttaactgcacttggcatattcactactcatgtgccgtttagggaacatactcccaggtcaggtctgtcaacccagtgatgtcattaggaaaccgcgggagctctttgctccgctctgccatccataatcctgctcttttcagaggccttatttttctcagggtagtagtcactggcagccggagccaggctctctttgtatactgcttggagaggcaagagaatggcttcctgtggctttctctcttaagattaaggacctttcattcccacaattgtgcaggaagtctctcttcatgtgtccctctggtccacaggggcttagatctgttcatctctcggcaaaatgggtcaaggaaggactggaatggtttttatggcactgtccctggagctttgcccaagtcagctgtgccgccaccgccaccctgtgatccacccctttactcaattacacattccgagtaccctaggcatgagcctgggaaggtggaaacacacacacacacacacacacacacacacacaaagagagagagagagagagagagagagagaagtccacgctctttcctcaaggaagacaccccagtcacttgcctctctattgtaagggtctgtgggtgagataattgctctcaccaagactgtgcttctctcagacctgatgggacggttttgtcctttttaatttcttggcaactcttgacaggcttactccttatgacctatatcagtaaagacagaacaggacaactgaacacacccagtgaagagaaggatgagaaaacacgcgtggagtggttggccaaatcagagccagcagctggccttggtcacctgtgtgacagcttctggttctgcccaagtctgtccaataggccatccctcccggtcactgtctctatagctgtccttgggcagggtggacattgtcaaagttcctctccttgagcccagtttgtcatgaatttgggctcttgagcttgatcgtctgagttgaaaagcaccaagcgatgttaggtctccggccaaattggttctatgagagcatgggctttgggtggctttgttagtagcttgttcttgggctgtgactgcagccagagatcttaattcaggtgaagactgaggaatcctggctctgtgtgcactgctcctgctccgcacactgctttctgtcttgaaacaactttcagattggactgctacgggggtgggggttggggtggggcgagtaaaagccaccctgcttttctgttgcatttcatgagtggcttcttccctagactatgactatgctatcttctcccctttcctacactcagctatcccggtttttacagaaaattttaaatcataatacaatacagcactgaattgaccgtgttgaccatatttaagcaggcatggtattaagtacattcacagggttgtgcagccaccaccccgcatctgaccacacaaatctgacagaatgcagaattgagacactcgggctcatcgggccaagagctatttctcttttgatacaaaagtctgtgcgcttcttgttgttgttaagtggggtgcaaactcgcgtgcacctgcatacacacgtgtggaggttagaagacagcttgccagcatcagttttctccccagcccgtgtggttgtgatcttgatgacgggtgacagcaatccaagtaagtgtgtggagagaagccatctgtggtgtgaacacctagagttctgaagaccgaggcaggaggatctcgaattgaagtgcaggttaagtagcaagaccccaactaaagcaaaagctaaaacaaacatatttaaaaaaaaaaaaaaaagattaggtaggattgattgaagaagtctgagtttcgggctggcgaggtggctcagcgggtaagagcgctgactgctcttccaaaggtcctgagttcaaatcgcagcaaccacatggtggctcacaaccacccgtaataagatctgacaccttcttctggtgcatctgaagccagctacagtgtacttacatataataataaataaatctttgggctggagcgagcagagttgaccagagtgagcaggacaaaggtcttaaaaattcaaaaaacaaaacaaaacaaaacaaaaattcaattcccaacaaccacatgaaggctcacaaccatctgtacagcttcagtgtactcacatacataaaataaatcttcaaaaaaaaaagggggggggggagtctgagttgcacagaagtgcctgcaaagttaaggagaaaaatggtttcacaagtactttggagtctaagctataaagaggagtcaaaagataggtgccaagctttgaagagtgatccctatacttgatttttacgtaaaaataaatgccctagcagatgcaattatggaagcctagctgttcttagttgtccttgatccctgacccatttcctggatgggcaaagatggaaatttggcaccagctcactgtcttagggtttctgttgctgtcatgaaacaccatgaccaaacgaaagttggtttatacttccacattgctgttcatcatcaaaggaagttaggacaggaattcaaggagagcaggcacctggaggaaggagctgaggccctgaaggggtgctgcttactggcttgcttcccctgccttgctcagccaccagcccagggatagaaacacccattaatggactgggtgctccccatcaatcactaattaagaaaatgccttatagctggatcttatgggggcatcttctccactgaggttccctccttggaccagtgagcagtcacctcctgttatctgcagaactgtcgagttctaaatgttgatgtagttatatattatgcattttgtatcagagacatgaacccaccagttgtctaccaaatatagttaataacaacgtgctacattgattcattgtatgtttgtatgcaggtgcattcatgtacaggtgcaatgcacctgcgtgcataaaatctgtactgcattcttaaaagtagtggagtaaattttaagtgttcttcccacaaaaatatgtcaggcaaacatgtcctggttagctcaatttagcacaacttatgcatattttaaatcatacatagtaaatgtgatcttgtccattaaaacatttttttttttagttagagtgagctaactagcgagtataatgcttttttttttgaataaaacaaaatttttaaatgagccaaaatatttacaatagagctttgaggcaggtactgataacttattttgcagttggcgaaaccaagacacaaaggggttaaataaatgaggtagcaggtgtcaggggcaggacttgaaccaacacagtctggatccagcagtggaagcttcaggctgtgttgtattggggagttgagagctgaggggtggtctggaggccaggctgtgaagttggcctcgtgggcctcaggaagtgactgggacttgattgcttgtttgaggaacctgttaagatttaagttttcctaaagttcagcctttcggcctgggtatatagcttagtggtatagcatgtgctcagctcctgtggggctggacaaatcaatacagagataaaacttaccatggagcaccagtgtgatggtttgtatttgtttagcccagggagtggcactattttgaggtgtggccttgttggagtaggtgtgtgcatggctttaatatcccagtcctagattgcctggaagccagtcttccactagcagctttcagatgaagatataaaactctcaactacttctccagcaccatgcttgcctggatgctcccatgcttcctgccttgataatgggctgaacctctgaacctgtaagccagtcccaattaaatgttgtccttaaaagagttgccttggtcatggtgtctgttcacagcaggtaaaccctaactaagacaaccagggagagtagaattaagtgagacacccatagaaggtcatggagctgtcctggctgagcggtggtgatgagagcggaaactgaggaagggatgaggacagaggatatttggagatacgtatactgtattagatttggttaccacttattagacaagaaagaagagtctagaataattccccaggtttcctaatttaagaagactgaggggaaaggagggaaaagaatatgtttattaaggacttctacagtggttctcacctagaggcctgtcttagttaggatttcgttgctatgaagtgacactgtgctatgaagtgacaccgtgaccaaggcaactcttctaaaggaaagcatttaattggggctggcttgcagttcagaggtgcagtccattatcactaaggtgggaagcatggcagcatgcaggcaggcatggtgctggaggagccaagagttttacatttggatcttcaggcaacaggagaccctgtgtcacactagatgtagcttgaacatatatcatctcaaagcccgcgcccacagtgtcacacttcctcctccaacaaagccacatccactccaaccaggccgtacctcctaatagtaccacttccctatgagccaagcattgaaacacatgagtctgtggggggccattccttttaaaccatcacagggctcaattgtgttgttccttctaggcatttgtgactgccccagccttggaaggtgctagagcacctggtagaaggaggccaggattgctgtccaatatggcattctctatgacagctttctggcctctaatgtcagcagtgcaaagaccaagaaccccctccccccttctattgcgttgcccttcttcatggttaatctacaggtgggtcatggagatcatgttgtttttcttggttcgagaactgagacggagagaggatggtggatcacttggccaaaaccatgtacttaagaagtgtccagaagcaggctttaagcttgggtctttgtgaaaacgtaaaccaaatctaatagagtgagcctcctaggtactcctcttacaccttccttgccttccatcatcaccaccatcaccatcatgaccaccatcatcatccttgtcaccaccaccaccattcatccaggaaagctcagtggcctcttgggcttgcctgtctcaaatgttcccatccttccctctgcctcacagccgtggaaggctcacgcagggttacggagtgctttttcttagttgctggtttcatactggaggtggcaggaagggaaggtggctatttatagtccgctctgcagtggatcgaattttcccatccctaaggacttacagtggtagtcaaagaaatataatttagctgtcagccttctgctgcagcttgagatgagaacgtgcgctgccattatcggtaaggtgggatgaagtggaaaataaaaaaaaaaagctcacagccgaagtcccagctctctgtgcggctgggaagcatcgcgggcatccccaataatggctctgccttgagaagctgtgagatgaagaggagaacccaaaggtcgtggaactagtaagcttcatttcatttgcaagaggcaaggagaccttggtgttagtctatttgaatccagcgtggagcttgcagttgctgcctggtcttaaacatcatcctgacctgggcattgttttagatgaaggtccttcctacatgcaggctaccttccttggtgactcatcatgttagggctccagagacagatgtcatggctgagctccttgtaggtcattgtcagcattttccagttacatatgacttttaaatgttttaaattacatgtatgtgcatgtgcatgcataagtaacatacataaagaggtcagcaaatggcctttgggagccagtttcttctatgacactttgacccaggatcagactcagatcattatcttgggaaatagatttatgtaggtgtgtgtgtgtatatatatatatatatatatacacacacacacgnnnnnnnnnnnnnnnnnnnnacatatatgtacatatatatttgtgtgtgtgtatatatatatatatatatatatatatatcacactcatgtggtcacacatacatatacaaatgaaaactaaagaaatttttggcctgtgttttcaacttgcagtgtccattttggatgtaacctacgagctgagggtggcctttattagtatattaagatcattattgcctactagcttcctgtgttcagtgtgttcttgactctcaggaagtcatacccaacagggaggggactcctaattggtagcagagcctttttggatgactgatagactattgtataccaccatgacattgtcagatgtgaagaactgtcacccggccccaggagcttagccccactgagatcatttagatctaagacatcgtgctcactgttggtttgattttgcctaaacccagcctttgcttttaaaggtagcttgatacagaaaaatccctcggtgaatgaacatacttcatttacctgcttattttctcattccttagcaacatttctttcccttgccaccgctagaagaccttaatcatgtcccaggtggtaaatgattttgctgtggctttttttttcccaaggcaaacagcaaccagttaccagctgtttgagtgcaggtgttagatagagcccagacttgaagttgccaaagtcttctgtataactttggcccttttctctttctttttctcagctaagatgatgatgataaaataacgaatatgaattatttttaaagagtgaggctgctcgtgcatggccatctgagtgagcacctctgttcagggcagccttttggggatcctgtctttactacgagtggtgtgaccacgggccagtgtgtttctctgtattccttactcaatactgttagatcagacccattacatccaacagcaccttagtaatgtggtcttccctaagtgagacacccaagacctggtttgggaaactaatatcccccgggtgagcaagcacacctgcccaccactcactttagtggctgtaactggatgcaggcttccatggtgacagccccagctgagaaggcccaagaaggtattggctgatgacctccagttgatgtgtgtgtgtagagttatgaccgtcaaggctcagaagatgtcctggtggttaaactattcaaaaggagagcgcctacccttgggaatactccttcctgccttggaaaatctgcctcagggaagaaatttgttacatcttatgtcgtagaaaaagggaggaagcagcagttactggtggatgtctacacagtacttgtatttaattcctctactgttacttcatttacatgactatttgcttcgactccctgctttgtctctgtgtctctctgtctctgtctttctgtctgtgtctttctgactctctctgtctctgtctccctgtgtgtgtgtgtgtgtgtgtgtgtgtgtatctcaaggggtcaatccttttccgaagactccattttcaccgaagttacatagattaccattgatttcagcatactaggaaattaaaaactagaatttcttgctgaatgcagagcttgtttggagttgagctaatatttgtaaacttggatcttgtgcatagccagtggtgtttaaaggttttttttcccccttagtctaatatttttttaaagtgattagtacttaaataatttaagacccagattcttacagtgaagttaaatgtgatttagttttggcaaagaaataataatgttagccgggcgtggtggtacacgcacgcctttagtcgagacagggtttctctgtatagccctggctgtcctagaactcactttgtagaccaggctggccttgaactcagaaagaaatctgcctgtctctgcctcccaagtgctgggattaaaggtgtgggccaccacaactggtggcattttttttttaagatttttttttttttttattatatgtaagtacaccatagctatcctcagacaccccagaagagggcatcagatctcactgcagatggttgtgagccactatgtggctgctgggatttgaactcagaaccttcggaagagcagtcagtgctcttaaccactgagccatctctccagcatgacctactgcattgagttagctaggacatgggtggtttgtggtttagtcagttaggcagagtacagttccagtgtactcatgtgctgtgcttagaagtgattcccctaccccgacccctatctgtgctagacgcttccttcttgatgtcgaagggaatctttgaggactgggccttgtagagagttctgggtctgttaatgttgtgccctcgactgggattaagatatttctcaccggaccccagtaaattctagagggatgttggaccttatccaatgctggcttcctgtttagaatattaactcccattgttttttgggggactgccaccagtgtttgtgccatgctgtttgtacttttagctgaccaaacaggctgctaaagaaatctcttctttatacagctatcctgcctcaggtgtttcaatacagtaatgaaaaactgactaataaggtctagaggggatctacatttcaatatcctttacaggatgtttgaatctagtttttcagataaacaatcgtatctgataccatgtggacattagacttccggaagtgaacacctcagatccagtctttcccagcattctcagggccctgttcctttcatcagcagactcacaggcagtgagctaacttgacagttaatggctaaggctttttaaaaaaagatttgtttttaattatttgtatttacgtgtgtctacagggatatgtacataagagtgcagttgcccacagaggctggaggaggatgttgggtcccctggagttggagttacaggcacaggcagttttaaacagtcccatgtgggtgctagtcattgaaatcaggtcttttagaatagtcaactactgagccatttctcaagacccttgctggttaaagcaatttctaagtagggtgagttgctgggggtaggcatgtaggattgtgttagcttacctggctgggggtctgtgagggcacacctgatgcatgtcagagtcccacggacttgggtctgatagctaagaaatggatgtttgtacaagaaagtgaagtgacttgcttgtgggactcctccatactttcccagctcttgtgaccgtccacacagtgactgagtgtggtttgtgtcgtcctggagctcctgagcaatgggacagaagaaagggatactatattatagcagcatgtggacaggaagtgaggtgtgcaatccaggaagctgccccggggaatgctgggatcttagatgagattgtggtgctgatggagggaagcagcctctgtcaaagtaggaaatggagggaactcggtgtgtgtgtgtgtgtgtgtgtgtgtgcgcgcgcgcgcgcgcgagtgtgcgagtgtgtgtgtatgtgtgtctcatgttcttttactggttacacattagtaataaaatggtgctgtagcaaataaattcatgtacccatgcnnnnnnnnnnnnnnnnnnnnnnnnnnnnnnnnnnnnnnnnnnnnnnnnnnnnnnnnnnnnnnnnnnnnnnnnnnnnnnnnnnnnnnnnnnnnnnnnnnnnnnnnnnnnnnnnnnnnnnnnnnnnnnnnnnnnnnnnnnnnnnnnnnnnnnnnnnnnnnnnnnnnnnnnnnnnnnnnnnnnnnnnnnnnnnnnnnnnnnnnnnnnnnnnnnnnnnnnnnnnnnnnnnnnnnnnnnnnnnnnnnnnnnnnnnnnnnnnnnnnnnnnnnnnnnnnnnnnnnnnnnnnnnnnnnnnnnnnnnnnnnnnnnnnnnnnnnnnnnnnnnnnnnnnnnnnnnnnnnnnnnnnnnnnnnnnnnnnnnnnnnnnnnnnnnnnnnnnnnnnnnnnnnnnnnnnnnnnnnnnnnnnnnnnnnnnnnnnnnnnnnnnnnnnnnnnnnnnnnnnnnnnnnnnnnnnnnnnnnnnnnnnnnnnnnnnnnnnnnnnnnnnnnnnnnnnnnnnnnnnnnnnnnnnnnnnnnnnnnnnnnnnnnnnnnnnnnnnnnnnnnnnnnnnnnnnnnnnnnnnnnnnnnnnnnnnnnnnnnnnnnnnnnnnnnnnnnnnnnnnnnnnnnnnnnnnnnnnnnnnnnnnnnnnnnnncactaagtgtgatttatagtagcagcagggggaactaacgcgtccgtgcttactagattctgctttaaaaatcataaatgtaacaggtcacgtaataaagtaagacaatgatacatggaaataaggggagaaaagaaaagccttttaatatgaagttttgtgaactgtggaaattaaagattcaaatagtctcaagaacggttattcaaggaagacattggaatctcagtagaaatgatagtgccatgggtgtgctcagcccttactccaactcttctccccacctgtatgatggttgtgaaaaccatcagtccagcagcccctggacggacagagtaaaactgtagcttctggtccccccttccaacacccaacacacacagacacacacactcacacacacacacacacacagacacaccatcatcaccaccaccacacacacaccacacacacgacacataccacacacaacacacaccatcatcatcaccaccaccacaccacacacaccaccccctccacacactcaccatcatcaccagcaccaccactgcacatacacacacaccatcatcaccctcaccactgcccctcaccccatcatcaccaccaccacacaccacacatacactctgctttgatctgatagcttgccaaatagcccctttatgaagaatggacttttttgatctgacttagctttctttgtgcaaacatctctattgagtagttgttgaaagcaaccagtgaacacttaaaaatcagatgtttgaaagcatgctgctatttgaggccaaccaatgacccagccaaaaagcaacaacaacaaaaaacgaaaccccaaccccctcaggtgtctttcctcgggtgctaccacctttttttttttaaattaatattttttattagttcttttacagttctgtgtatgttttgatcatattcactcactcccacaaccagttctcccttcctttgtgttcttacttctttttattaaatccatcaagacccgcctgtgctgccccaatggctgtgtggacatccgctggagcatggtaaacttacttttagagtctgtacttttagagaaacctgactgtccctgtcccagctagcagtggccaacagctccatgcctagaggtgagatttcatgtgccctcttcatgctggggtttggtcttgggcttgtacaggtcttccacatgctgacacaccgctctacgtttgtatatgcagcttcggggccgttttcagaatgcactgtttctcggtagtcctccaccacatctggcttttacactccttctgtcctctcttctacaatgatcccttagccttgagaggagggaggaggggtataggcatcccatttagggctgagcatcccgcagtctcttattttatacatgttggtcagttgtggatctctatgggtttttgttgttttttttttttttttttacaattatttattttatatatatatgggtacactgtagctgtcttcagacacaccagaaaaggtcatgggatctcattatagaaggttttgagccaccatgtggttgctgggaattgaactcaggacctctagaagagcagtcagtgctcttaaccgctgagccatctctccagctcatggatctctatataggttaatcattatcaattgcaaatagaagcttctctgataagggttgagagatgcactgatcaatgagtgtaatcaggagtccatctaacactatgtccatttatcggaatggtagtagtaggttctcctttaggatccatgggctgcctatctggtttgtggtgctagataaggatggatttcttcatgcagggcaggactcaaatccaagcggagagtggttggtcactcctatgatgccagtgggcatgccctgtgcagccggttaccattggcttgcagcgctcacagctgagtaagagtgacggtccctttctttctctgatggtgtagatgttacccctcaggactgtgaaatctaaccagtaggagtggagcttccaggttgacgccagcctgatttctcttgttgcctgactcaagtatgcacgtgagtcttattgtagagttttgtatggtaaccaagcacatcgacgacaatagtctgtagtggatgtctatgggatctcagtggccaacgactccaaaagacgtaacccactcctgcctctgtgtatgttatactggaacaggtaaggttaaattaggggagggtaggagagggaagggtaaaagagggagcatggtgagggataaatatcaacactaaagcctttttttaaaaagtcatatggggggcgctggagagatggctcagcggttaagagcactgactgctcttctgaagatcctgagttcaaatctcagcaaccacatggtggctcacaaccatctgtacagctacagtgtactcatatacatacgataaaaagaatcaatctttaaaaaaacagtcatatgggaactgatatagaagcttacacacacagacacacacagagttaaaatggagttagtatgtaatggggcaaccacatccatccctcctagatatttattattttttgaggcaagatctcgtattggtctgagcttaccacataggctagggtagctaatcagggagttcaggatctgtcttccctgctttctcccccgaggctgggattacacgcataaaccacaaggggaagacttttgccaggtgtcacccaagcatctctggcttggaaaactggtccaacccagagatgcttggtgacacttggcacattttagttgtcactctgagagaccggagagagccactgacagctactgagtagtggccaggaatcctgctaagcatcccataatatgccaaacagcttccccaaatgaggggcgaagagtctgaaccaaaaaaaacgttactttttactaaggttgagggaagttgacaacctttcatctgacttagaagaaattccccgagagagagagagagagagagagagagagaatgaattatgccattatgccatgaagtgggcttttgagagtccaggaagtatcttaatttaaaataaacttcttttgaaaaatgttgtttcaagatcagtgacgtccagcattaagtgagctcatgaggaaaaaaatagcattgttcatgcccggcggcttcttgcaggctgtcttatgtaacataggaaaacaagccggtgcttacaattgtagcaattagcaaagcgaaggtctaccggggagagctgagctccagggcgtggacagagatggggagggtgggagaaggaggcttgcatcttcggaactgttccgagtagaaacaggccccgttgggttttgtatggtaatcaaattcctggcactgtgttttttattatggaacaggaaaggttaaattggggtaggggcagaggccctgtagaaatgagagggtattagtcttcttatatgtatgcctaagttggctgggaaatgaatggcttttctgtctcttatcaaagatgctatgtgcagtgtgtatgtgtgtgtgtgtgtgtgtgtgtgtgtgtgtgtgtgtgtgtgtgtgtgtgtgtaggccagaggtcaaattaaggtatcatttctcaggagctttccgagttgtgtttgagacagtctctcacagggccctgtggcttgctgattagaccagggtggctggcccgtgagccccagggatatggctgcttctgccacctgagcaccttggttacaagtgcatgccaccacacccgccccacacctgcctcacgcctggctttttacgtgaggtctggagttcagaatccaggttcttatgtttgcatagcaagcagttactgtctgggctctcttccctacccttaagagacacagtttagttattgcttgtcttagtcagggtttttattcctgcacaaacatcatgaccatggagcaagttagggaggaaagggtttattcagcttacacttccacatcactgttcatcaccgaaggaagtcaggacaggaactcacacagggcaggaacctggaggcaggcgctgatgcagaggccatggaggggtgtcacttactggcttgcttctcctggcttgctcagcttgctctcttatagaaccaagactaccagcctagggatggcaccacccacaaggggccctccctgcttgatcactaattgagaaaatgcctcacagatggatctcatggaggaatttccccaacggaagctcctttctctgtaataactccagcctatgtcaagttgacacacaaaaccagccagtacgatgctctacttagttacttcatctatgttgccctggtatttaaggagagaatgtttgaactggggtggtgtagagaacataaatcagaggtaggggctctcgtcttgaggaagaatgaagggagctgttgtgcaatctgattttctctgagggagaagggtgattatggctaggtcacttcttgtttagttcatttgggacctagtgggaccacaaggccggaaagctgacggctgggttgggctgagtagaaatgggcttcgtcatgccataaatggctttgtttcacccctgttgttgagggaaagtgataaccccacgtggctttggaaaaaaattaagcaagacaaaaaagggactgtcgtcatagacacttactgtgcagtacagatgctaagtgctcctctttcttgctggagaaagcatttggggctgggtgtggcagttactgaaggcccttgcgctgcaaggtgtgagaacgggggagaacacctggatctgcaggcaaagcagagagtgctccacccagctccccagtcagaattatagagctaactcaaacaggaacacacacacacaggaagtgacatgactccatccaccccaaaactgctcctgcgattctagctgcaccccccgcagacaaccttcagctctgaagaccataaatgtccccagttcacatatggcccttagcagctttctataggaccccagtctcaagggtttcgaggtaggctgcctgcatcctaatgagatgtattacttctcagtcatgagctgggtgactcatgaccctcccatgcctcagtttcttcatccacataacaggaatccgagtagtaaagtagccttgtagagtgttaggactaattttacaatcctggggtcagggcctgaagcccagttaagcactccgagtttgctaaccgcggctgtatgtgcacactcccatggcagctaccaccacactcataactcatgccattctggccacagaagtcctttctcctcaaagctcaacacccaaaatgcatagtgctgaccgagactcagccgtccaaggaccacattcttggtaaataaggaaaaaaaaaaatgaaggaaacccctttgagaagcatcagggaatagttagcccaaggacatgggataatcacatccagagttgacaagtgtcctgtagtaactgcttactcaacactagttggaacaaggttggcaagtctaaatgtacatgcaggcaaaacatctatacacataaaataaaataaatctttaaaattctaaaggaagtgagggagggcagggggggggggatgcaaccccagcgtttgtctgggagagcctttagttaaggagcattcctagacagggttcgaggcaccagctctgcagtgcgcagctaatccacactaaagctctcattcaaggctgacactctggtcaaacctttggccttgacatcatcatctttgaggctgtaggctcttcagtagagcttgtggctttggcacaggcaacaccaacaggggtgtttctgatagagacctcagccttaaagacagttttggtctgggatggtggggcaccacctgttatcattcagtttgaatcccttcctggataattggtggacccaaatttattttaagaaaaatacctgactgtagagaagaggaaaaagttcttcattcctgtccctgctgctttctagggcccaatcccaattctcctaccacacacttaactctctcagtggggagtcaggtttgttccttcccaccattgcctcctagagagaaagcaaaggaacaaggctgtacttattagctagagaaggcagagtaaaaataagctaaggggtctgtctgcattgcggtgcttgctggctcctgcagctggagtggacttgggacaactgttctccccttcagctcctccccagctgtgaagaataagacttccttggggagcaggagaggccaagttgagatcagagaacaggtgaccattgttagtgagtttaagcaaccccaattccaagcatggtcactccagaaagaagtgtcctttgggcttggctcctcaaagtgaccatgtgcagattgctatatatgctgttctccacgaactgcaaactgctgtgtgagcgaaacaggtgtctgtggccttgctttggaagtggaatcgcatttggggaaatgcatcccaaagtgcaaacaaccatgctgctttggaaggaaaacccatgcaggaaatttgttctttgccccaaaggatgtttgagcacaggaaaatctggatgctggaatcaattcagtcagaacaaagtgaagcagaaaccggtgtggccgtggtaatgtgtgtgtgtgtgtgtgtgtgtgtgtgtgtgtgtgtgtgtgtgtgtgcatgtgtgcatgtgtgtatgtgtgtatgtatgtttttacactgttacttcttgcttttcctctgaatccatgtgttttcagtctccctttcagagcacttaacttaattatcatagaaaaagataattagagttggctgactagatcagggagaggaaactgtgatatatatatatatacacacacactgtgtgtatatattctataaaagtattttatttttaatgacttatttctttttattttatgtgcattggcagtttgcccgcatgtttgtctgtgtgagggtgagttacagatgattgtgggctgtcatgagagtggtgggaattgaaccctggtcctctggaaggacagtgttcttaaccactgagccatctctccagccccaaataaaagatatcttcaattaaaaaataatgttggcctgctctatgctgaattgtctggtctggccagcagtttctccatagcaattcagattacccttttcccaagcacaccttccttctagtggtttggttgtaacagcccagtctaataatttctcattataactgacagaccggggctgtgcgttttattttagcctgaaataaagacatttatgttgtcttaagaaggaatggaacagatagcgaatggaaaccaggattaaagatatgacttgaaatctttaattctagttctattccctgccccccttttttgttttgttttcttgaaacaggatcttactatataaccctggttgtcctgaaacttattctgtggaccagactggcctcaggcctcaggcttctgcctctgcctctgcctctgcctctgcctctgcctctgcctctgcctctgcctctgcctctgcctctgccagtgctgagattgaaggcttgtgtttttaatttacatctggcttccagttctattttctaataaatattctttggcatatttggaataattctgtttatgaatgttatgctgcattttaaattataaaatcattttttaaaaaaagttttaataaacaaatagtgcaagcacttccattctgcggggcacccttcttttttcctttctcttcttttcttttctttctttcttccttcctttctttctttttttttttttaataaaaaagggttctttgctgtcagtttcttggaataatttaaagggagaaatattttttttaggaacttgcatcctaagtagaaatatttctttttcatctttatgtgtgtatctgtgtacatggtgtgtgcgcgtgagtgtgtgtgtgtggagaggtcctcaccgtctaccctgtttgagacaggctctcatgttcaccccagtgcacaccaggcaccccccatctcactgtaggacactcaggttgcaggtgcatgctacagcatcaactttgtggatgctggggttcccacctcaggttctcaggcttgcacaggaggccctctactcgctaagccttctctccagccctacattttaataggtcaaggcttacagaaatggtgatttatatgtgctgttaatagcatatgtagatctagtgtggcactttatgataactgagacttggtgattgttgacagaaagcctgtgattgtaaagaaaggagcaattaattgtgtgtgtgtgtagaaattgctattaatattaatataatacccaaacctcattgtgtggtgatatagcatgagctgtttctcctgctgattctgtcttactgcattttgagagccagagccaaccagctacctgctgtgttcaaactttaagatggagttgtgacttcagactcagtgaaaacagcccaggtgttctttaactgatgagggtgaacaacaaaacattgtgtgtctataccatgaatagtcccgagccttgaaaggaatgaagtgaagcaaccagccgtataaggatgtgtgatgtatgaacccacggacaggaaaatcggcaagcccaaagatacagaaggaagagctgctggtttagtggtgttgtacaggattcccagaggtacggctgagaactgggtgagctttggcattgtggaaggaaggtaagggcagttctgttgttagttcactatggctaccatagcaaaacaccatcccagagacttaaagaatataagtctatgttctcccaattctgcaggtgttagaagtccaagatgagggtgtcataggatcgttccaggtctgtctcctgggcttgtaggtggctgaggacagggctttcacaccatgtcctcgggaagcctctttgtagacatacccctggagtctgtatgtgtgcataggctaattgtgcgtgtgtgtgtgtgtgtgtgtgtgtgtgtgtgtgtgtaatactactggtcagattggataggatccctccttaatgctttcattttagcctaacgtctttcaagtcttggtctgcaaatacagtcacattggaggcgatgggaactaggactgaagtgcatgcaaatttccggtggggcagatagatgttaaatctcaccattatagcaaactggctatgtgaggacctgatgcagatagggaaagctgtatgggccactagggtggtaacaatgggtcaaggtggagggcagcgtgccaggcaacagcggggatgtggtactccaggctacggagacacagtctggaatgtggcgggggtgggggtggacatgaggaggcgtgggactgagagtgacatcatcaaagcagaaaaagcaaaattaatgtctgaagggctggggtgtagactgatgggagaggctggaaagatggggtcagatgtacaagatgaatgggcaaacgggaagtaaagagactggcgactttgcaaagacaaagaatgctcaaggcttggagctcaagtgttagacagaatgtcatcatcctaagccttgacatttctctacatggaaaggggacatttggtaaggggacctggagccccattgctggtgtggttggtaaagtctcactggttctgtattgattgcagaatagcatctgtagctctcatctgaaaggactcttggaactagtcacttatgtcttcctttgttaagagaagaatattttaggcttattaaccacagatcctcctaagaggtttttcaggaccctgaactggaggttggagagagacacatgcgcttgttaatcattggcattggctcagatggtacagattttacagctggctgcttggccaggggatgatgggattcctgataattattatttcgtgtcttacctcatttagaacatggggtgttactcctcggttctggctgattttgctcagatagtgaagtttgagttgtgcttcctatgtccgtcatcttgacttgtaagcacccaaacccttcaactggagcttctttgggttctattgaatgcctgctacctatacctctgtgaaggaatggcctctggagcagccggctcattaacgactgtttagcttgctcagataacagcggtgagatggaaagaagaaggttttcatatttgctgttatcttcaagaaagacatcagaagaattcccaagaacctagaagcaactgggtccatgtgaagtatgtgtgggtaggcaggcgtggggcgaggaaagagacccagagaccaggatcagagagtgatgtctgcatggtatgtcttcgggtggacatttttggattattggaatatatgactcatttaagaagctatactgtttatgtgcactggtgtggcttgtgtgtgtatgtttgtgcatgtgcaggtacccgagcaagccacaggacacccccaggtgccttctcctttcttttccagacaggggtctctcattggcttggaactcatcaaggaggctggactggctggttagatagaatccatctgtctcagctttctcagcaccgggactacaagccaggactagctactgaaaatgtcttttattttgaataagatctgtggggcttcaatcttctgctcggcctttagacattgggaagctcacctccccagccccaaaactgttgctttctgaaaactttacagaagaattcttgagcccagagttttagtcccttacttttttggtttgttctgctacatcagaagggaccgggggatcacatgacccatgtggtttaagtgtaacccaggctttgagttggctgccgagacttttttcctcttttctactgagaaaagcatttcttaatccaaagcaattaattagtggagggataatcttaaaacttcatcacatgtttttttttgggggggggaagtgtgtaattactatattatgtaaggctctgtagcacgaagctccaaggtttaggcaccaaccaagcactcactagaccacatctatatcattttcagtgaatctcaaccagctgtgtgcatggcagctcagcctgcttcctaccagtagaacaccaatactcgtgtctctgtgactttcggcgccagttgaagtctgccgggacagttctttcagaaaatggtgtgggtctttctcagggtcacttcactacaaaagcagcagccactgttccccttccccccggccccccacaaggcacctgtacactggcatttggctgacactgctgacagccgtaccctagcttcataggagccttttttgtttacccggatgcttccatgaagcattttaaagttttagactataaaaaacttaatcccttgaagctttcctttttatatgtgcctatttttaagtaagtgtatttcagtatatatgttcatcatatggtgataagatcggggtaggtaaaacgctctcacctgtggggctggtgagacgctcagtgcgtggaacttgccgttctttctgaggatccaagcttggtccctagaacccgcatcaggtgaatccttgggaatcacacacgcacacgcacacacatacccgtacacacacatacatatcaataaaataaatctttatggaaaaccccactttcaccccctcagaacttttgtattcattttgattcgtgtgtagtgtagtaattgcctgtttatgagcatacagtgtggtatttcactacatgcacgaagtgtgtatggaacagatcatggccagtccaatgtgcgagtagttagatgatgcattttgtagacgactgtgacatactagtgtgttataaacccagtgctggcggctcatgttcctgacagcctgtagactgtctactgtgaacttcaactgcagttgctattttgttaccatttggtctctctataaagcttcttatggaatggatctcccaaggctgaccgtttacatatcatctgttattgaaaaggttaagaactttatggtcatattttgtgtaaatgcacctggagcattacttttcttgtcccgtgcctactctaaattgtttagagaagtgccccgcccccttcctgggtaagtaaaagcttggtttccatggtgaccttggctgtgaggaagctgagtgaaacttgtggttcaagtgtggtaatgacttcacccgaccaaccgcctggcatatttctgcctggcatatttatatgctttttcacttagtatgtctttatgtgaggctccagttcatgtgggggacaaagagcttaaatattttcaaattccgcagatgctcagccaactcagcttgctagcctcacaccatagcaggggcctcgagttcagcggcggacaggtctgtgtatccctgcagcagcagcctgggaattagagaatactccagtctttgtttgactatgtctgcaagttgtggtctcagagaaagcctaactctcatgcattgtctccctgtccaactccaactcggggtttgcttctcactctgttgatagaggaaatggctggagaagatgcagctgctgaaggtttgggagtggctgatgggtggtgcgggagacaggaagataagcggtttgggatgaccgttgactcttgggagacgctagattcagatgcttccagtagacctcatgaggaccaaggggggatgggatatgtagtatcatcagaacggcagcgctgagctaggtctgtcaccttattatcaaggtgccataagtgtaagtgacactttgatatctgctcacacttctgggagctaggacccccaatatcaaggtgtggtcctggttgcttctgtgcctctcttcttgttttattgatggccctttgctcataacattttttccattgtgtgtttgtccccttagtatccctgtacaagggcacagacctactggaattgggcctgctttggtaatgtcatttacaatttgatgctgactacaacttgaaaggccctgtctctctagcgcagcctcgttctcaggtagccgtccctcgcagggatggacagagttcagtctttgggggatgattttgacattttgagggattcctgttcttgagctgtaaccatgatgtggccatggaaattgtacgtgaaaaatgtagaggcttggtcgaagatagtattgcttaattattacaaattattttgagagttgatgtggagactcaaaagcctgggccactgtataataagatctattaaaacttaaagagcatttgttgggctgggtgtgatgttacatgcctttaatcccagcatgtgggaggcaaggaggcagaggcaggttagatatcttgagtttgaggccaacctggtctacttagggagttccaggccagccagggctacatagtgaaactgtctcaaaagaatttttttttttttttggcttggtttattccattttcttgagccaaccacgctttcctgtcatactaacattaacacctctgatttgttttactgaatgtgcaagtgagatctctggacctttcctcttgttcttttcatagaaaatcttttatagaggcacgctgttggagaataaactgactgccagcagactctcatcttccacgagagctgggatgtccttttgtctggagatcccaccgatgacctctgcaggaaactgatggtggcatgtccttgctgcccactaactctacgaggagagtagccttgtcctcattctgaggtgtctctgttacattgtgcatgaggcccacacaccttattccactataaacctaaataagcagttgtgagcccaagttctcatgacagccctttgagatccttctgtgccccatgagcatctcccaccacatcaggaccctttaccatcctcctggttctctataagccttgcagcagttggtctgtgtcttgaagtgtggtgactacaatttgacacagcgatggagggaatggtccagaattttccagcccgccatagtaggcagatttcaggctttggagcgtcttagattttgagttgaatctcccttgtctttgggatgatgattgaacctgcttagaagtgcgcccccctcaatttcctcgtttacaaatctaatatgtaatgagttagggcacatacttatcgaatgagaccctgttatgtatgatagctcatttgggtggctgctgatggacaggggccatctgcactcttacggttgctttttctgagtcagggttttgaagtgggtgaattcacccacttcatctctactacaacctgtagtatgcgtgctttgtctctacttggaagacacattggcatcctgagcagctatggctcctggcagtgctgctgcagctgctagaggaagagccagagtttccattcacacgtgggtcatgcagcctggtccctcacctgcagggctgtgttccactgacacactatggcatgagatttgtcttcatggaagcatacatgcaatgggtcactgaagttgcctgtgactgcaggagtccctttgcccactatatatctatatatcatgactacaaactcattccagctttagcgattggagccaggcatgccttgggaggtagttttgtcccttctaccctagttctctgtttttggtgctccaatgtaggcattcacccattaaatgtcattttggggacttacaattctgtcattccctattagatgtcctttgtagccccatgtcagccccgagtgtggcaaacaagccctttaagaaccacggtaagttggctctggtggtgtgcagttttgatctcagcttctcgggaggctgagacgggatgactgcaaatccaaggccaacttggataactagtgaggccaaagtaaaaagacggctggtggtatagttcagtggtagggaatttgatggcatgcatgggagtcaagattagtgagtactggaaggaaaaagaagttactggtgcaaggtggtatggcatgggaagggtggagtcagagaatcctctgattcttgccacccaccccctcctttcagaccaaggtaggtaactatgtagggccattggcagcaaaggaggtagaagtgtagacagtaaagcagtgtagactctcactgtgggtgagatagacagtggggtgctggagtcggatatgtgtgtaatttcctagttgcagagattgtgtagaatgaagaggagtttccgagtgactctggaattgagactatggtgggtctgttggggcatgaagtgccatgcgtatccaaggggcgtagcagaagtcacaagtgtcaacagacagggaaagagccattggcctggaatacatggtggcacttcagaagtgctgaagtcacgtgaggatggcacagaattaatgggtaggagataaggactagaacttttgtgatctagaaaacttttaaaagcacagaagccacagtggctcaaattcaagttttgtgcaatttaagaatcacagatttgaaggggaaacgaaaaattctgacctttattctaaaaccaaaagactagtctcttatgtcaaatgtcatacacatgcgcgcgcacacacacacacacacacacacacacacacacacagcttcttttaaagtaataatgtgagtgataccaaaccaacaataactaaaaaagacatgacgacacttcattgaagttggcaggccaggttatcagctataagcgtgagggtttgggagtgtgtggtttgctaaatataaaattaggattatttcccctggatatccaacatggagtatttcaagaagtattaacctgccagggaggcatcttgaataactaactgaaagctgtttggtaagaaggggaaaagtgtgttaactactcgtttttactcagctttccagtctgtcaaaggcagctgataagcacccccgggtgaaggggtgtgtgtgtgtgtgtgtgtgtgtgtgtgtatgtgtagcagtgtatgtctctgtctcagtgtgtgtatctctgtgtgtgtgtgtgtatgtgtgtatgtatgtgtgtgtatgtgtagcagtgtgtgtctctgtctcagtgtgtgtgtgtgtgtgtgtgtgtgtgtgtatgtagcctgccatccctcctatccggaggctgagcagcccctatcctgcttccgtttcacagtgaaagtccactggaaactctgtcatgtaaggagacatgtaatacatttgggatgctgctcagtggcctgggcttatgtgtcacttgacagcagtgacttcgtttgtggtagggggaaaatcccatcagttatccaagctctgtgttcttccacactagaagggaaatgagtgtctgaaggcagagtgatggagaaggcctggaataggctgaagctggtgggaattatagtcactctcattaaattgtcaccatttttaaaaaaagtgtttatatggaagggatactagatgttagaaaaggacacaggaggttggggtgcaacctagtgatagagtgtgtacctacaatgagggaggccctgcatcctaacattctctctctgtgtgtctctccgtctccctccttttttcctccccctcccccttctctccacacattaactgaatggatccaataagatagttgagacaagcctgaggttccttggaaccctggccccttcccttctcatggtttcctgtggccacagacacgagtgctgtgtgccctgtctgcatattcaagtcccacttcctggccacagagcttgcagagtctctctcacggactcagctcgccacttggcctgtgcacatttctctgtttgtaactctggtcacccaagccctggtgaacaacttgctccccttttttcctggtccttccctgtcttcccatgctcactcctgctcatggacctcagctgaggcgatggctcccttcctaccaggctgagtaggcttggtgggctcatggcttggctcatggccaggctgcacaggggctattttgaggggtggcggttgaggtcatatatatctctcaggtctctctcacatgagaacagtgtgtataggctatatatatttgctctcctttgataagtgcctacaaagaacacttaaaaatagcaataaagttagtctccccccaccatggcttatggatttgaaaagagagatctttctgatatgtctttctgtttttgtctcattagcatggtctaaactgttaccttgaaggatctgggtgtgtttctgggaatttagaggttgaggcttttgactgtatattcagtagatctcgatcttcttgctgatggttaagatgtgaagggccaggctgtgatggtacatgcctttagccctcgggaggcagaggtggaggcggaggcagtcaactctctatactagcctagtctacagagaggacaacctgggctgcacagagaaaccttgtcttgaaaaaaacaaaacaaaacaaaacagtggggtggggaagggaagcagggagaaggagagaggtggagaagtgtgtgtgaagtccttgtttgaatctatccaatactgtaagacttgtgttacaacaagaaataaaactcttatctccacccacctaataagcccttaatgcaagttttaacacccccccccccccccccagtgaagcctccgtttactctggaggtcctttgctctctgttctaggaatttgatggcctgaagcaatggcccttttctcctggaagttgtgaccattttctcctgcctgtgcaccagttctcttcagccaacacaaacacatgacatctataaatgtaaatgtcatgtgtttatcaacatgtatagctactttgagatgcgtttagcctttgggccataggttggacacatctagaacagtgtggacagtggctagcccggcactgaagttactagcatcgtgcatctctctgtgtatggctggctcacccttgcgcatgcaccccacccctgcacctggcttgctcttccttattatgcacacagatcctatgtacgagactcctctcattcatacaccctcaacctctgctttattgcagctggaatcttgctccttcctctcttgatcgtcagacagcttgggattctagcagtctagaatggtgagggaactgggaagtgaacaggtatggaaggcaatttcaggcactggtgggaaaggggaaggagatggcttctcacgactgtgggtggtgttggaattccatggtcttcccagtgctcacatgatctaagagagagagagagagacacagcacagggatcagcccaccccaggagtttagtggaggaacccttgtctgctggggacttcagcatttatggcaccaagcttgaaggtcactgccagttccttgtaggcatttctatagtttctgttatttcatactgggagtgatatgcctacataccttaaattctatcagaagactgctttgtgtggtcatgaagtttaggttataggttttcaggatgtcaagtgcttaacattttggggctctttttttgggatgagtttgctttttttctgctgagaactcctccatctgtgtgtgtgtgtgtgtgtgtccagtatatagtcagcagctttgtgcctggaaatggtggattaatggcctttgtgtatagacctacttcttcaggcaggtttgatgatttaaggcattcggtgatcaaccatatcttcagccccctcccccttatggatctacctcctaagttccatttgaaatgaagaaacctcagcaggttctgcaaacagctgcccatttccaccagcataatgactttttcctttatagtggaaaaataagattgatccttcccgcaggcccataaatgcctgtaaatcaggaccgcagccatgttgggatgagaattcttttgagccttgcaaaaatctttatcaccatggcaaattgttaagaagagcaggtggcagtcataactggggagagattttctctacccgttggccatttaaggttctgatcttctgagcatcgaagccaactcttcctagcagttcagatgcggccagcaaatctcaagaggcaaaagcatttggaactctgccttcaagtacaagagagaaagagaacgccatgaggagcgttttgttcctaagaattatggcacagccctccagctctgcggccttttatcctgattggggggggggggagcggcagagaaacgagaccattgtcaataactgtgtggaataatattttagtgccagctcctctcagagtgctgtcaagaacagggagagaaagagagagccttagattgtccttctgaactgtcgcccaggcctcagggtgtgcacttgcaggcgacttgcagggccagctccaagtggagaaacattgtgttcaccagaggaagaaacagaaaacctaaaataaatccatgcttagttgaactaataaagcaccagctaagaagttcttttgattggtgaagggagcagggaaccaaaagctgggtgtctcctctacctcgtcagtctcccagaatgtgctatctcatttttgatttttcgaggcagggtttctctgtatagccctggctgtcctggaactcactttgtagaccaggctggcctcgaactcagaaatccacctgcctctgcctcccaagtgctgggattaaaggcgtgcgccacctactgaggaacctcttaagtcaacctctgtatatgcaaatgctaccattaaatccactctggccctcaacaccaccagaataattatgcaaaacatcccagtccttgcatatctggttctaggtatctattcagaagtgaaggccctgtgttaggataaaacccttagataagatagcacattatggtggtggcacacacctttaattccagcacttgggaggcagagccaggcagatttctgagttcgaggccagcctggtctacaaagtgagttccaggacatccagggctatacagagaaaccctgtctcgaaaaacaaaacaaaaacaaacaaaaaacaacaacaaaaagaggttcctcagaggatcctaaggtagagggtaggctggactacagagtgaggcatgaatgaatgaatgaatgaatgaagcatttaacagaaatcaaactagagctggtggcagtgtggcttccctccgcctagttttatccagaacatttttaaaagaatctggcagagtacagagtgctaagctgtctgcggggagagctcagggttacagtttggctaagcagaggactttctgagaagagactggaaagatttggtctccctggattccnnnnnnnnnnnnnnnnnnnnacaaaacaaaaacaaacaaacaaaaaacaacaacaaaaagaggttcctcagaggatcctaaggtagagggtaggctggactacagagtgaggcatgaatgaatgaatgaatgaatgaagcatttaacagaaatcaaactagagctggtggcagtgtggcttccctccgcctagttttatccagaacatttttttttttttttttttttttttggtttttcgagacagggtttctctgtgtagccctggctgtcctggcactcactttgtagaccaggctggcctcgaactcagaaatccgcctgcctctgcctcccgagtgctgggattaaaggcgtgcgccaccacgccccggcttatccagaacatttttaaaagaatctggcagagtacagagtgctaagagtacagagtgctaagctgtctgcggggagagctcagggttacagtttggctaagcagaggactttctgagaagagactggaaagatttggtctccctgatcaggaaggccagccgtcatggctgccatgatgtcaggcaggtgggtgcctttgtatcagcctgcagaagtgggaaggtcagagacagaggctgcacagagatgctttgagggtcctaaccccatcagaagtcattctgctgggcccctccatgaggactctcagtcttaagagaccagagaggagccgatgctctcttctccatgacttctctattccccataattcctttcacctcaggcctttgatcgtgggctgctgagaatacagggaactgtttcagctcttgatgacagctgtctggatccagaacttctgtttttgttttgtttctttttttttattattattattagttctgtgcacactcttgtgccccagtttcctcatctacacaatagggacagcatctttttttacagtgtcactggactgtgtgtcattcaccgtggccatcagcatcttgtcctcgcatctcagggcccacccccattttctttcagcagtttcctgagctctcaaaagcttttcaggtttcctgtggaggcatggggaggttgcagggttcttacaggtttgcaaggaaatcacatggcttataccattgagcttcagattttcagcatgaaaaaggtgtgctgatacccctgacttttcacacatattttccaagccatagtgtgaacacgtgctcacagccagcagcctcgggtgactagtttgggaaggacagaggcaggagcttactatagatgctctgggggtgctaacccaatcagaagtcactctgatgggcccctctcggctccatgttgcctgataagattcagactcacaatcgttagggtcaaaggctcatcacgtactacttgacatggtgagttttatgtgcattcttgtgtgacagttatgatacttatcctactgtctagtcacgaattacaatacaccaatgacagtcaagcgagcttgttttcaggttggcccaacaactgtcaggtacctgtttatgtgccgattctcaatgttttgactttgttatacaactagcatggctttatgcagaggaatttttgaggctgcacctgtctggctttcttgggtccttgtttcccctcacagcatccagcccacagttttactgtgacaactgtttattaaatgccctggtttagtgttgaatggtgaaagcaagcaggcccagattctcttgtccgtcactgacgtttgctgagcgtgtgctgtgttctagacagcagctttctctcagtgttaggagtgggagagggatatgtcactttactcagtgagcattgaggaccttcgcaaggtaaaggaaacttcccttatgtattaaacaaggccatttcccagagcgccatcagagggcgtaatgcacaacctacccaggaggcccacctacttggatgttagcttaaacaggttgaacatgctgttcagagttcaggatggtttggatattagaagtttgaattagggatggtcagtggatagcatgtgttcagatatttctaaattcagcaaagtctgaatcggaaataattcttgtcccaagcgttgtgaagaaggacttgatctaatatccaaagagctatagtctaactaaggatggaaggacagtgttttggtattaagatttaggagggacttgcaggcacactttactggcgatcccctgggccacagcccagtatagggacatttaaagccagcttcaagcaagatgggtcagacctcatttctcttttctctttacattttagagagaaacttaagtgtgtgagaaagtgtgagcaacagtgctgggacagacgacagacagacagacagcagacagtgtgcatagctcctatatagcaggaagtgtctcaagcaatggtgtacccacgagcctcagtgcctggggagttaacagggagggcgttgcacagaagaaagggaggaatgggaggtagagcaggccacacttcctgcctgtctgtcgctgaggaaggtggaaggggaaagcgagaacactggtctaggtactcagtgctgggattcctggcccgactgactcatgagccacataggaatgatggggcgtatttgagaatgctggaacttttctcagggaatttggggtggggaccacaaagggtatattttggggatattaacacttaggagtggggaaggggagtatgcaggaccccccacgtagcaggaggaggcgtcccaggaagtcggtacttaagatgtcccatttctgttgcttgctgagtttctgcctgcttttacaatatactcgggggccgtgtccaacaaacgggcaggcccaataaaatgaaaatgattaacgcggggccaggaaggaagggatcggaaatggatgtcaaggactcctgagacagatggtagctctgagtttcctggcagccaggccaagaagaagctaggatgatgcgtgctccccccaccatctgctctgcagcactggaaatgggtgctaggagggggtctgcccagcaggacacacccttgacccaccggtccttagatcttttagccttataagtgaatgaaattatcctgtgtagtccagtggtcctcaaccttccctttaatacaattctgcatgttgtggggaacccccccaaccataaaattatcttggttgcgacttcataactgtaattttgctactgttatgaaccataatataaatatgttttctgatggcctcgggcaacttttgtgaaagggtttttcttcccaaaggattgagaaccactgctcttggtagctgaatatggtggtgttagtgggggacttgcgaagatgctgtcgggcagtcgtttttttagccagttctctccaaagacagagtgaagactgtgtgtggagacttctgtgacctgcttgtgggagataattgccagctgaggctcttcctcagggtggaagatggttgcttcggtgggcaggcctgcaagggcagtctcctgacctgtgcatgttctccctgaccagccgtgaccctgaactcacctgtaaagagtaggcttggaacatatttaatcaagccagtgctcagtctatgcaaagcccaggcctcagcatcaggatgaaatcctgctgtctgaggatacttttttttttaaacagggacatacattgctatttaattgattttttttttttttttgaagacctgccgcttagctgaaacatcccaactcgttcttctgggtaagaaagtgaactaaaacaagcaacaagatcaaccaacgaaacttttttggttggtgccggtgcttcctatcctgtgaaactcggaggaagatgtcttctctctccacattttactgagagaacacctaaaggagttgggtagtggaggctgaagctcctagtgatggcacaaaggagatagctgattttacattaaggggggtgtggtcacagctttaccaagtagcagcagggagaacacgcctacttttctttttctttttctttttctttttctttttctttttctttttctttttctttttctttttctttttctttctttctttctttctttctttcttttcttttcttttcttttcttttctttttcttttcctttcccttttcctttttctttttcttttctttctttctctctttctttctttctttcttttcttttctttttctttttttttttacatgaaagtttagtgtgcagctggatgcgagagggaattgggcagagacagggctgagtggagccctacatcctctgtgtgacagggtgtcagcagtgttacctttcccatcttcagcctgaccagctgccttactgagggtgatgtagtcctcagagcctgggaacggctggactgagaacaaggccctcgcaagctgccccgttctcaatgagggttttgttctaacccggtttcatttgcatttggtgtgtggagcgcctggtgacagaaagagctgctctttgttatgggtaacgagggcccaggtttctgtctgtgtcaagtgtcatcgaggagcagtgagctgctgctcctctgccctccgccattcccgtgagcacatgggggttctgaacacccctcagtggccagactgcggaaggaaggcccggcaggagagaaaggcagctgtgttcacagaaggaaatgccctccctgagctgtgccttcacagtgtagggcagctaggagccttctccagcttctccagccttctccagcttcttcctttgggttggtttgccctcatttgcaccctgagccaagacaaggaaagggcctctcttcacctcctttattgtgccatgctaggtgctcatggaaaagtgagtaaaattttcacgatgaagtacatttggaagcagttaatacggaaacagtggttaaagagcattttctgagctcctcgcccctcttaggctaccaggaaggtctgaagcaagagccagcattggtgcgggatcctcggttggttgctgcacgttcgcctcatttctggcctatttgaatccttctggttatgccttcgcccacatcacaggtcctagtcagctcgacaaggaaaaactccttgggatcaagaagagagtatattctctggcctggttggaacctaacaccctgccctcctttctttgattggttttttttcaggctctgataatttgttttaaaataagtttggggatctagtttccttccttccgtctgcttttatcagaggggcagcacttatggtttggagaactgtagtcacaggcctgcaggccctgatccttagaagtccgatttagaacccagttttgactccagtgcacttctctggaagttgctttgctttgtaacccccaccacactgaagacatgatcagaaccagaaagcacacacaaatgttccttcgaagtttctggcagaaattatgtgttattaacaggccatacttttctcctggcaaattttgggaccagtcttaacatcccaatttcttccttttaaaaaattggaaataaataaaaactggcatgaaaatatagtggaggtttcatctagtgcctgttgctgcttccagcgtgctcagcctttgttggctcgcccaaagtaccatgatttagtttccaagttcacagtgagggtcaaaggtcgaagctgctgcctcctgcacaggggactgtgcttgtgtgtcctccagtggccctgcaatcacaaacactgcacacctgagaggaggtttccaggatggactgaaggcgttggctacaagactgcctctgcaagtttctctgttatggtggccattgattggttgaactcttagctagtctcagattaattactaaatactccaaatacagtgtgtgctatacacagatctcatatatgtagatgtctcccactttgctcaccccaaatacacatatatttcaaatatttaaaaggtaacggttccaaggtacaatagaattcaaatttcacttataattacacaatgcatgtgtgtgtagaatagtatgtttgggtgtgaaacatacacacttatgctagcacttctgttcacaagccacttggacctgtgatcaagcctttgtgattgtttactgtgcgcactcctggttcacgtgcaagaagtgaaatgcatagttgtgtggccttcccatctaccagggatatgttactgtgacatttaccaaaatggcaggaacagtagtagactcgtggcttattctgcccatgacaaagtggagcttaaggccaagagtagatagatatgccatcccagtcgacccagttctatcgcttacctccacctgactggggcatcttctaccttgcctggctctggttcatcaagagccagcatttgcagaatcagcagagctcctcttcctcctgctccggcttagcatctgtgtatgagtcccaagagcacacacctgcttttgtaaatcaattatttttaaccattactttgagcatcccacctgctgattacagtagagactgatctgtccctacccccacttgcacctccctcccacacaggcaaacaaacaaacaaacaaacagaaggtctaaaattgcagcagagcagcggagcctgctgttggtggggtcaagcttgtatggggttgcagaggagcgggagactcaccatgggaaagttggtcattggccattgaagacggcatggcttgggaagcagtgaacgtagccttgtccatacaaacaaggagagtggcagagagggacccagaggcagtggcgaaggaacacacagaggtggatcccagcatagaaagtaccgaggatgaagtgtatgcgtattcaaatttctggcagacggtactgttcacagcagttaaaagacatttgaagtcagtattatcagtgtggatagaggaagtcgagacaataaagtggttggtggattaacaagaagctacggtgtggcacagctgtataaatggagtattagtatactgcagtgtgaataggctgtaaagtaggatacaacactaagaagccaggttcagtggtgagatgtgcttcatgcacagttgtgaggaccagagcccagcatccatggaacaagctgggcatcccacaaaagccagttccaagtgagcggcagagggaggagggccgttgaggcttcctagcttccagtgtagaaagcagaagaaacgnnnnnnnnnnnnnnnnnnnncttttgagagctcaggaaactgctgaaagaaaatgggggtgggccctgagatgcgaggacaagatgctgatggccacggtgaatgacacacagtccagtgacactgtaaaaaaagatgctgtccctattgtgtagatgaggaaactggggcacaagagtgtgcacagaactaataataataataaaaaaaaagaaacaaaacaaaaacagaagttctggatccagacagctgtcatcaagagctgaaacagttccctgtattttcagccacccccccccccaccccggttcaggaagagactctgcttcacaggaataaacagagagaagtagaagagaaacctggggcccccgtgtggctgctctgtgtgtgtacaggagcatggccctgcatacatcctttcacagacacatcctttcacagatacacttgtcacacacgtaaatacagcttaaacaaaacaaacagtactaagggtctggggagatggctcagtgtttaagagcattgttgctttggtggaagatcctggttcagttcctagtactcactgggtggctcacaatcatttataacttgagttccagaggctccaagggccctgtaggtgccacacacatttaatgtacttgctcacgcgtagagaaaacactcatacacatacagtaaatctaagaaagttaaagaacaaagaccgtaagaaaccacacactaaaaagtcaccagtcttaaggtttcatgtgtgtgagatacctagagtatgtacatgcaaaacaaagcagtggttgccaaggtctgagggggagaggagagacatagcaatgtatgagcacggggttcccttccagggtaatgcaaggttgaaacaagacagtagcggccatagctgctgtagcattctgtgaaagtactaatccttcacgttggtcaccttaaagttgttcatgttcatgaatttgacctcccctaaagtagggatactttttgctaaggtatgaaaaagatgcacatttccgacaaggaaagaggccattccctttaaaatctgtacaaaacctcttcatcattcgcagtggtttttaaaattagatttatcttagttatgcgtatgtatgtgcctgttctgggtgttgggagatggcatgcgtgcattagcccaaaggctaccagaggctggtgccctggggtcccctggaactggaattacaggggattgtgagccacctggtgggtgctaggtgctgacctcaggtcctctggaagaacagcaagggctcttacctcggagctctctctccagcccctttcctaatgttttgaatgaccagtgtactagtttctcttttaaaattcctgtacatttataattgactttttaagaaatgttttaccaatttttacaggttacaaagaacgattgcaggattttgccctatgaccactaatgtttcccccaattttttttatgacatcagtacttttaatttttatgactttactactaggcagatcttggggactgcctgtacacatgtacacttagcagttaatattcacactccagagagccaacactaccctttgctactgaggattctgagagaattcttttattgaagagaaggtgttatgcatgccctcaaaaacagagtaggttttattcgtagttacattagcattaccttggctccttctaggataggggaagtaacgtccagcaggcattaggcaaagagcctaagctttaaggataggtgcagcctcagaggagctcctgaggactggctggcagctgtatgtcagatgtgatgacctggttgtgtctcagcttcaggatataagggggacgagggctgacaggtaagatgcctggtcatgatgacgccatgattgggccatggtggtgcagtgtaccacaggatgctatgatgatgcccgcgtcctaatgcggcatgctcatctcatgggccgcaggcctatggtaccgttcactaccaattcactcaatgaccgtgtcttgtttgcttttgtgcttttggtttgaggtcttgtttatgtagcccaagtggatcttgaacccactgtgcctccaggctacctgatgctgtcttcggtggtgtgtgttgcagtttctcctgccatccaaggattcaggctatgctcgtattgcagctggtttactcgtacttacccagaggctgggagataagcattagtcagtctggaggcacactgcctaataaatacttgttaatgacaagtgttattaagaaagcaacacttggaatacaaggaaatcaagatcttattctacatctcttaaaatgccaagggaatccattattctttgcttttgatcattggtaatgtgttttgattcaagctgtctctttccctcacccatggtctttaatttttttttaaacttctctttcttacttatattttgaacatggttaagaaccttaggcagtacccaccacagtgggatgtaataataggtcagtgtatgactgtgaagctgacagcctaggatggctcataccctctgcatgcgtcccagactttattaaactaaaatctaattaattcagatttttttctctatcagggttgctcgtgtgctctcggtagtgctttttttggatgaaagaaacatgaaagccaacttaaaagcacttgccattagtgagcagcctgggacacagacccaaggctatctccgtgaagcgtgccatttccctccggcagccagccttccaagggcttagatcaaggactggccctgaataaagaaaccctaaagaaaccctagaaagccctgcagcccaatgtggcacatacacagtccagccagggctgtttctcgacctctaggaagaaactcattcctggctagatgtgtgtccaatgagagcccaggtatcagatggcctcatccaggaacacacacacacacacacacacacacaatgtttatattatatatatgtgtatactgttgctgtcttcagacaaaccagaagaaggcaccggatcccattatagatggttgtgagccaccatgtggttgctgggaattgaactcaggacctctggaagagcagtcagtcagtgctcttaaccgctgagccaccgctccagcccaaacaaacacatttttaatgcttgtttggttctgctcagccagctctctccagtactataaagttcaggaccccccacccccacccctctgcacagggaatgaatgatgccacccttggtgggctctcatgcccacaagccaacatgatctagacaacttctcaacggacactttcttctcaggtgatcctaagtcgtggtcagttgaattgtaaaattcgccgtcttttaaagataatttttaaagcactggtctgtggaaaggtaccaaaaagggcagacgctgccagtcacggggatcttatagggtcgcctttgcagagtatctactgattgcctggcactgtgagtcaagagaaaggtagtcatataacctgtgctgtggagagggtgagggctcagcgtgtcagcagtgcaggccaggactgggctgcctgcgggaggagcctggacctcctacttctttgtgacgcttgggcagcttgctgacttagttctcaggcatcccctttccccatccacacaatgctctaatgaaggactcatcccagaagattaaataatttaatgtatgccaagttctgagaggagtggctggcagagagagtaaatgtttaaaaaatactctcactatacaagtatggcacaatcaaatgtctggccacaatcaatcctccaaacattcacgcagagtgggtagtctcagtcagcagcgaggaagcaagaaacctcaccagttgcctacagccgagggtggaagagggatttgaagcaggagctggacctgacccctaggcccttgtagcctgtgatgtagactgacaagccaggagaatggttacgaaatgtattctttgcaaggactatcggcaaggaccacagattgggtggcttaaacgacaggcatttattttctggagacgagaagtccaagatcaaagtgtgagcagatttggcttcctctggtctcgtcctgggctggcaggtggccatcccctccctgtgccctctccaggccttccctctgtgcttccaaatttcctcttcctgtaaggaagtcctattggattagggcctgtcgtagtcacctcatttgaacttgattccctctccgaggatctgtctccaagcacagttgcagtcagaggttctgaggggagctaggacttcagcatagagatgctcaagagcataagaaaggccaaaacgggagccgacagctggaggactcggctggtaacagttagagaaaaggcagcgcctggaacacagctagtggagccaaggacttgttccctgagatgtttgaagtgactttcaaaggaccaagtccctaaaggtggaaaggtccatttgtatggtgagaacacgcccagaatgtaggtgcctgggattggcatatggtctactgtggtgtgaggctgtggtggtgggagaggggctgattgtcacatcgtgccagctgcccgaaagcagagaggtgaatgttggtgtacagttggcttcctccttttcctgtcttctgtttggtctagaagcccatgccatgggatggtactacctagatgtagactggggcatgcccttcagttaaacctccctgaaaacatgctctctctctctctctctctctctctctctctctctctctctctctctctctctcacacacacacacacacacacacacacacacacacacacacacaccacacaggagaattgaatctcattggtaattccacatccagtcatgattgctgactgcagaggttagccatcacaaatgcttgcttggtgttagccccagaaatcagtatttcattttgacatgtaaatacatgtcatttgacattcgaaatttgctgaatcaataaatatggtaccactggggctgggggtgtggcccagtggtagaacacttgataaccagctgagatgaggctccagtaccatgaaaataaagcaataaaacagaacccccaatgggccgtgatacaattcctttatttatttaatcttattttgtctttttgaggcagggtttctctgtgtagccctggctgtcctggaactcactctgtcgaccaggctggcctcaaactcagaaatctgcctgcctctgcctcccaagtgctgggattaaaggcgtgcaccaccactgcccagctacaattcttatcatggtatgaagtatggaggacagaattttgagtttcatattagagccttagaagtggtttctttgctctaaaatcgttataattttctttttcttcttttaatatctctcaatatgaagcaccctgctccttaagtatgctttaatttcatactgttactttaatgaactgattgtagtgtggcagagattaaagactggtgttttaaatcctagacttgtcacttagcagcctctcacataagtggattcaaccttctcaacactgcgaaggggtcacacgactttctctgtgttacttcatgtagcagtgcctggaaggttccagcactggattcttgtctgggctggcactcagagtgatactgtctattgatggaggctgacaggtaaaggggattcatttattcattcatttttgtagcttttatgttttagagatggcaccgtggatcccatgtttccctggaattcactgtgtagcagaagataaacttgaacatctgattcttctgcccctgcctccagaatgctagattgcaggtgtccatcctcacacttagttaatatggtgttgagcatctaaccagggtttatctgagctacatccctaagccggttatcagataatgcagtatggacacacagagaactttaattttttaaagcattatttttagtagaacaagggaatcaactaagaatattggttcctctgtccttcattctggtggctgaatggccccatgggtctggtgatctgtgacagaaccctgaatggatgaaagccctcgtcagggtcttgtccatgaagactaggacctgagatttggagtcgaggttgtttgcagatgtggacctctatccgaagaataggtagaaagagtttctcagcccatggagccccatgggtggtggtcatgtgaccactctttaatttcagggatggggtgaggtggagatgacctctagtatagctcaggctggccacaaactccgtgtgtctgtgtctcagcctcccacatgtgaccaccgttgacactttgtgaaccaagaaggtcctactgattttgagctcagcaggtccctggagccccaaagctccaagtctctctagcaaaggttctcagtatgttctaaaaggcacctctggtggtccttgagggagggaactatgctccagaaggaccccttgttgaagaatagaggatggtgtggaaatgtagtgggtattttcatgtataacctcacccgtttggactcacacttgtatgtgaggggctgatccctgctcacttgttgtttgaattgccagaccactcccatttttagtttattgtttctatccatgtgtgtaccggtcacatatggaaatagatgcacgcagttggaataatagaaataatgtagaagacatttctttcgctcacggtatccctttgccatagggttgtaaaatgcgttgaataccagcagtacacatgcttttgtctttaaagcttgttgagatgaggtccacatagccacgtgttttacccatttaaagtctattgctggtcagggcatggtaacctcggcagtctggaggttgaggcggggagaactggtgttccaggccagcctgggctacacagcatgactctggttcacagaaggaaacaaagatggagaaataaaggatgcaattgactggttttattgtggacccattgggacacccttgtcttaatttctgaatatttttgctatcccaagaaagtggttatcaccacacacccatcacccatctctcccccatgccccttccttgtctttaagcaattgctaacctactacgtgaggctctagatgcgcctcttctggttgtttctgataattaaatcattccctgtgtggtctttggcaacctcagttaacttagtgtccttgaggttatctacacccttgaagcaagcaagtattggtacctgatttcttttttattcatcaaaccatattccacagtatgggctacagtatagtctaacattgtgccctctttgaaagtggaaactatatgggcaccatagggtactgcttaggtattgttgatggacattgggctgcttctccttgtttttttttactattaaaaatatagcactacagggttgtcaccaataaattaattatctgaatgattattttaagacaggtcttaatatatagcataagctggcctcaatctaagcagtcctcctgtctttgtctcccaagtgttgaaactgtgtgtagcacaagctagctcatgccagctctctgccttacatttgtcttggctttgtctctagaaatcgaatggcctccttgatcttgcagtaactccacatttaaaggttcatggacctaccaggcagttctccaaagagcccctcccactctccatccccatcagtagcaagcagataagggcccccagattttctgagtcattgccgagagccccgtgtgcctaagtacgactgtcctaggagtgtcactgactattttctgtcatttccagcatagctaagaccagcttgtgtctcctttacggttgcatttttcctcttgtagcttaagctgttcttcactcgggcagatgtacagtgtatggttgcttactgagagttgtctacataacagtgtcttaaaaggcaacaccatcctcctgccaccagacctgccttctcagtttaaaacaagctgtgtttcagtatttgactctttagtttagtcagttttcaaaacctctattttagactcaggtttaaactgagatatatatatattatggttttagtataaaattataccctgtcacttgcatgtgttatatgtacgtgtgtggacatgtatgtatgtgtatgtgtgtggatatatgttggaatgtgttcctggtgggtgagtgactgtatgtatgcaggtacacatgaaggccagagaatgaccagggatttctgtccctgtgtaccattcatcatgtcttttgtggcggggtctctcactgacctagagcccgtccagggaggttgagcggactagctcttactaccctgcttcttgtcttcttttgtcagagccagaaaggatttatttttgggttacagcttgagggtactgcccatcatataaggaagacacagcagcaggacttgttggggcggggctgattgcatctgatgatgcctggaagcagagtaggaggagaagaagagggagaaggagagggaggagggggaaggagagaggagagggaaaaggggaggggagagggagaaaaagaaggggaaagagaggggagagggaggagaggagagggggaaggagaggggagagggggaatctcattttatcaccagtgtattaactgtaggattcaggtaacagtttctgtttgtctttttttcttaaattctagtttgcagttggtaaaaaaaaaaaaatgcttttttcaatgtctatatttgactgcatattgtcaaaccatatggtttccgtggtaggcaaaatgtttagtctccccacaacctcaagtcgaaatcctgtcccacagtgacatgagaaggtggagccttcgggaagtgatgagcccaaggggcctctggtggggccagtgtcttgataatgggcacaccccagagacccatttagctctctaccatcagagagcacggctggaagacctggctgccagccagaaaccatccctccccatacactgaaacttcaggaaccttgatcttgactgcgttagaaccatgagaagggaagtctgattatgaaccaccatgatgggagttcaccgtaggaaccccaacgtccgagatggtttctaaagatgagagcattgcagagtgacctctctgggtagccagtctggcaccatgcctgcttggctttctgcgatgacagagcagatggtccgtgatgggctagctggggacagatggtaaaagagccaatgtggatatgattgcacagggctgtgaggaaaaaggctttccccatgtgtaataaatatataatgcatatttaagtaggcagttgtgtgatgacccaagtagacagctatcatcccacaggactgtaatggaactgaaaaattcctgttctttagcgaattttgggctgagtcatacaggcattcctcctgtgttccggtgacacagctatgagtggctgctgctatcagaaagtcacgatacagccgcatcccatacacaccgcagaaacttgctaaggagcgactgtcattactttataaatttactgttctgccttttcccgttacttcagagtacataccttcttacaggttttgaattttgtgtgcataggtatgcatgctgtgtgtagggtgtatagatacagtttatttgaagaaaaaaaaatacatgactggtgcccaagtgacagatgggttggaattggaggtatgtggaccgaggcaaggatatgagaacccagaggggtggacggaagccgtggctgtactggggactcttcctttgtaatcagtctccttttccgtgatggtgcgggctttcagacatttctgctgctggtgtggctgggataaatcttccttgatgtgaggctggggagttggctgaatggttgcttagtcatgtgagccagaggacctgaaattgtttcccaggtcctatgtgagaaatcacatatgatgacatgagtgcagtctcagccttcctatagcaaggtggctggcagagacagagtggcctgaaagcatacaggccagctaaactgaaatacacagtggagaaacgagagaccctttttcaacagagggatggtggaaactaaatccccaaagcatccaccggcatgccatggcatgcacacacactcacagagaataatggtgatagaaatcgaaaagacgtgttgtcttttggtaagggccaggcagaaacctttttagagtttgcagagatatatctcaaatgactgtttgagggaacttctgcaatgaaaaatccagcaactgaacgagaaaatgtggtctcacaggttgctcctgtccgggtacatttagaaacggcaggatttctctgggtcaggtcggctatgtatggtactcacagattgtagggagagatgattccacttttggcatcatcagaagatcttagaaagcctgtatatttttcttattaggattataaaatgcagtatgtggggtttttttttttttttgttttgttgttttttttgtttgtttgtttgtttgtttgtttgtttttgcgtagcatttgacatggatttgcagaaatcattctggttggtggagaaaggctcccaagacattgtgtggacacccagatgggttcttctgcctggggtcacacgtatacagatgcagcagcttgaaagcaatacagatctgttattttgcgctctctctctctctctctctctctctctctctctctctctctctctctctgtgtgtgtgtgtgtgtgtatgggtgtggtgtatattccagtaagtgttcactgagctaaaatcatgtgctttggggggctgcattccttcctgaggttctaggagatcacatcctgccgtgtccagcttctgggggtgcctgctttccaaggtccccctttccaatttaatggcagctgagccatctctctgcgcgtgctcagccatctctctgcgcatgctcatggctgcggccgtctccgccccctttactcaggcctcttttctactctcaagaaagaactgttgtgattacttcatgctcacctgcataatcaaggatgatctttctattttaagatcagccgactagcgactttaatttcaactgcagactgaatgtcccttctccatgtaacccaacagagccgcggagtctggctcaggatgtgggcatctctccgggccaatgttctgtctcctgtagtggtagacttaattttaatctgtttacattttaaatttatttagtttattggccttggtctatcagtctgtctctttctctcgcttcctctttttctagtctagtcacacggtatgaacttaaagctcacagaattagatttccttctggaaatgggggcctccatggaattcctatatgctgatgattgtttttaaaagcagtctttgggggggctggtgagatggctcagtgggtaagagcacccgactgctcttccaaaggtcggaagttcaaatcccagcaaccacatggtggctcacaaccatccgtaacaagatctgactccctcttctggagtgtctgaggacagctacagtgtacttacctataataaataaataaataannnnnnnnnnnnnnnnnnnntggctcaggatgtgggcatctctccgggccaatgttctgtctcctgtagtggtagacttaatttttaatctgtttacattttaaatttatttagttttattggccttggtctatcagtctgtctctttctctcgcttcctctttttctagtctagtcacacggtatgaacttaaagctcacagaattagatttccttctggaaatggggacctccatggaattcctatatgctggtgattaaggactcataaaattaatctttaaagtttttaaaagcagtctttgggcaggtgctaagaattgtttaggaagccgggagagctaagttgtgttgagtctcattagttcaggatattaaagcactaagaggtgtgcccgggagtcctctgaagatgagcaagaaagctagtcctgggttgctcaaaagaaacgctggtttcttaatttccagtgctttgatggaggaagaaacctggtctgggttgagaccgcgggactaggattctattattggacctttggcgaatgacttgcgctttctatgctcggtttaatatctgcttcagtggtgagaatgcatctattttgtaacaggacggggaggtgaggggggagaaatgagccaaagccggtcgatggaaacacttctgtgagcagtattaatggagggggtttttaacttccacttgggtgtaagcttgacactagaaatcttagaataggattctctccccgaccccctattaataggctagagaaatcaatgcagggcacatatttggcacactctaggataccctcctgtacttgtgagctataaatttgagatggagatgggatgcccaaggagaaatgttggttaatgctctttaggtattttgaccatgcccagtagggccaaactttcacccaaactctgtgccttcagaagccaggcatacctcgtaacctcctgggactatgaataacttaggctcacatcttggctgaacagtgacctactggttgtttatggtacctggcccagaaagcttttcagaataatgactttctccttggcctttgagcaaacaaatgtaggaacatatccaggcccctgacagttttctgtgggtcatcaaattgttcatcagaccatctcatttgtacagaattagagtatcagacttaacatcataatgtgatccttacagctcagtggtgtgggtttttctgtgccttgttggagccttgattcgttatcccagatacagattcccgatcctctccccagatctactgcagaagaattcgggaacgtgggtctcaggaccctgcagggagaaggatctactagggacactcagtattgatgtggcatcagaggaggtgtgcctcagtaggctacatagcagaagaatttgcagaggagaccaaatgacaacagtctttgtcattgccaaaacttacagcctggagaaatatagtataagtcgagtttgtaatgtagaactaagcagacgtgcttcaccctgatgggtgtggggctggaatgagcagactcactcagcagtgtctggccttgatcaggtctccatgtgcagaatgataaagaccaagacaagggacgggcttgaccagccagcttcccacctcctgccatgcaagacttcctagctggcctctgatgggttgagggagggtggaagatgttagaggagctgctggctggatcatccttcacctgaatggaaatcccaggctctctccaagagaaaggcggggcttagtacatgacagaagaaggaaccaaggctctggacacagaagtttcgagtccaaagcaaagctggctcttctttctctgcatgttttgtttttttgtcccagagataatgtatttcacccagacactaattgtaaatcagtgcgtggattaatgagaatgtaggaacatatccagactccattgtttcggagcagaaaaacattgcatcctcatttccattcagaataatttatgttcaaggtaatacgcaatcaattaaatttttcatcgggttcaaatttgatttgggtccattcttcagtttggaagtcagccacatctccaccgagcatttgtctttatttaccgggaagcaatcaaccatcttttttccttctttttattagggagccatatagtggtgaaaaaaaacccaccataagctaacgagaccgtttttgtgcacatgttgtgcacatgaatagtcaacctcattacattacttcctggatacctttgactgtttccctggggatccggaacctttacttgtgggttgaacaggaaagtttgcttccttgttggctatcagtaaaagccttggtttttaacctcagggttctggctgccacaaccactcctctaaatatgtagttagtatgagtgcagcaggattttttttttcttggatgcagggacacatggccttatcgcctttgaccctaacatgattaccattgctcaccatttcaatcatgaagcagacacagaattattaaaaaaaaatccagcaaactgtaaactttgtgactcagtaggggccagtgagataggtcagatatggagtacttgtgcaaacatgaagacctgcctgagcttgttccaaagcacccgtggacacagggagacatggtcatggtaacatacacttgtagccccagtattagaggtagagatgcgtagacccttgaggtttgctgggcagccgggttagcctaagcagtgagccccagtgtcaacacacaaggtgggcagctcctgaggaatggcacctgagggtgacctctggcctctacatgctcatgcacacatatgtatgtacacacacacacacacacacacaccaaacaaaaaaccgttataacccaacagttggttagacccagctctgttggtaagcacactggatcaagaatgtgccccttctctgcgttgtataggattcactcaatctttggtgtactaagcctcacttttcaagtgcataggtatctgggaccaaataaagatgaaaactgagccctgagaactaccttgtgccctccccaggctcaaccttccggcccaggctcagtcaccacaccacaaacttttgtaccaaatctttgaaaatttcccaaagttttcaagaagctgtgagctgttgataccgaagagaagccagtctgacttcttcatttccaggggagagggtaccacttccatcaaaatagccgtgactcgggaagaggcaccttgcatctctccgaggaagagatgctcccttcaggtcccactggctcaagggtctcagtgttcccgccatagcttctgtggcatcctggaccaaactgagttccccttgagggctcccatctctggtgtctttctgaggcctgtgataccccagcactgtgcaactgtactgaccccatcctttttcacataagtaagtctagtagtgtttcctgtgtttaatccaaacccgcccctgctggaatatgatttatttctaagcagtcttgcctgctgacaggatgcctgcatctcacctctctatggcccacatcatcctcttctgctcatggaggcagcatatcagaaccatgcaggtgggcttggaaaacccttagctgcctgttcacctttcccaagggccagagctataggggaagccgatggagggttgcaataatgagataggaacccagtgtgttctgatgaccctccctgtccccattctgttctctcggctccctggaaatagtctggcaggtgtattttgtagtcactcgtgactgtattcctttggacttgttcatgaattggcgccacagtgcctttgcacctgcattttgtgtgtgtgcttctgcaaaactcagctcacagatctgcttgcctgggtgcaccaggtaggctctggattcgttgccagcatcagagagttgctgtgggacaccaccatgtttgctgaatgattagcaagagtttgtcttcagcctgtcgggaaggtccagtccttcagtgactcacaacacattttctatctgtattggctgtggcgggtaggcacagatgctggccggttggtttccaagcttgcctagcttagtgtaagacgcgggcagaactgcagcttggcctctgacggttactgcctcctttaactttgctttctagccgactgtcactttggagctgtcaggcaaggcatttggaagcccgtttgtccatcgttctttggaagtccgtatttgaaggtcttctctctacctgctgactgttggagggaggatgaaaccttgcccagggatgccgtatgctgtcactcatctctcagtggtccctgttaggtttcaatgtgaagttcctcctgcaggcttgggtgtgggaaaacttggactccaagttgggaaggctctggaacctttgactgtggtgtagctagcagaggagttgacggggatgtgtcttagttgaggtcactcttgctgtgttgaaacatcctgaccaagagcaacctggggaagagggggttaatctggcttacacttctacactgtatgtccattactgtaggaactcaacaggacaggaaactggaggcaggagctgatgcagaggccgtgatggggtgttgtttactggcttgctcatcatggctcactctgcctgctttcttagagcctaggaccaccagcccagggatggcatcacccacagtgggctgaacgctctcctactgatcactaattaagaaaataccttacagttgaatcttacggagacatctcagttgaggttccctcctttcagatgattctagcttgtgtcaagttgacataaaggagccagcacagtggacttggaggatgagaactggtttgggtctgtgcaaggcctttgcttcctgacccgctaatatgtgaggagctctgtcacgtgctccctctgccatggactctcccatgccttcctcacgatggactctgtgtgaagcctcagcgcctgtcaggtattttttctcagcgatgagaaaaaaaaaaagtaacacacacacacacacacacacacacacacacacacaccttcccactcttcaggtctctgggcccagtaaaaatcccctgcttcctgcatgccagatggattggatggtgtaaagaacactgagtcaggctgagagatggctcagcagcggttaagaacactgactgctcatccagaggtcctgagttcaaatcccagcaaccacatggtggctcacaaccatttgtaatgagatctgatgccctcttctggtgtgtgtgtgtgtgtgtgtgtgtgtgtgtgtgtgtgtatgtgtgtgtatggaatgttgagttaggcagcaaggatacgaagggaatagggttgtaatgagaaacatatgaaaaggagggaagctgggacttctgatcagttcctcccaggactgtgttgggagaagatggaggaagtggactccgattggcattccagtcgtgccatttccaactgtatgataaaagattgaagttacctcgtggagggctgtgcgacggaatgaggcgactgctcagcccagaatgggcatctgtctcttcattcaccagatgcacctctcctccttgagcccattgttcctgagatctcaccacttggtctggtttataaattgcatggatggagcttggaggtcgtcttgcttagggtttctgttgttgttgttgttgttgttgttgttgctgtgatgaaacaccatgaccacagcaacttggggagaaaannnnnnnnnnnnnnnnnnnncatggatggagcttggaggtcgtcttgcttagggtttctgttgttgttgttgttgttgttgttgttgttgttgttgttgttgtgatgaaacaccatgaccacagcaacttgaggagaaaagggtctgttgggtttatacttccataaccgatgttcaccaccaaaggaagtcaggacaggaactcaagcagagcaggaacctggggcaggaactggtacagaagtacggacccggtagatgattggtgtccttagtcactcgtgacacacctgtgaagttttctatggagacttgaaatgccagaggtggttgttagaatgcagggggaaggcatgctgtttgagtcacaagctcttcccagactcctccgggctttgggagagcaaagaacagggtggtgattggtgggcagagagccgataaccagaatttacatgaaaatgactagttgtccacggggacaggacatggcctaaaggagatgccccagcatagatagaggacagccggtggctgctggctggaggtttgggtgcagcgagtagtgtcttccattctgttctctcggagcttttgctcagatatatcttccatgtactttatttcctaattttcaaggcatttagaaatgatgtcagcctatgaaaacacttattgtgacctattgcccaacgtgaaataataccccgtgtggcctcttcagatccttcacatttacctagagatacgccgttgactagggacgaagcccttgagacccttttctctgcatagccacgcgcaaatctttctatgtattttaacaacatttcatgtcgtctgaaaaatgtgtgaacaaagttttcgaacttgagagaattttcagcttgtagtaaagcagggcctggggagttagttgctcgagttttggggctgtgtcgccctctagtggtagcaggctttggctgaaagctgtcatcctgccggagcgaggcaggagtgcatggtatagaagagatagttacaagctcgctggtaagttgctgaaacagagttgagtgcgcttttaagtagctattgtccttgagctgccagtttgtcccacagtagacagagagttcagattggtgcacctttccagatgaagcccatttaggctgggtgaactgcggagcctactgtcgctcactggtgatcatttgctgttgctgacctttcattccgtgtttcctccagtctttgtcgattcggtcctcacgtcctgtgtatctcctcagtgtcccaccattttctgttctcttggaagctgagcagtctgttcctgaagtcacccccttgtagagtccccttcctgtcatttgtatctttttctcgtctctccttttattttttccatttgtgtttttcttctgtcttaaagcttcacctccctttggtccttgtgccatcaacatccctccctcctatgcctcctcgctgctgtgcctgcctcctacccctgcctcctatatacatggctccctctggggtcttcctggctccattcctctggaaacctctatgtacacgtacactgcactccgtgacccttgacctctttagcttcaacagtctatacataccacatttcagggagcctccttaggcctctttgttctggttacatctaaaatgtagatagatctgagacctcctagtcaatggtcttcattcctttcttacttgagattcctacttggaaacagaaagttggaccttggcatactcctgggcctaacttctcactcaggttccctcagnnnnnnnnnnnnnnnnnnnncgattggcattccagtcgtgccatttccaactgtatgataaaagattgaagttacctcgtggagggctgtgcgacggaatgaggcgactgctcagcccagaatgggcatctgtctcttcattcaccagatgcacctctcctccttgagcccattgttcctgagatctcaccacttggtctggtttataaattgcatggatggagcttggaggtcgtcttgcttagggtttctgttgttgttgttgttgttgttgttgttgctgtgatgaaacaccatgaccacagcaacttggggagaaaagggtctgtttggcttatacttccataaccgatgttcaccaccaaaggaagtcaggacaggaactcaagcagagcaggaacctggggcaggaactggtacagaagtacggtacggaccaggtagatgattggtgtccttagtcactcgtgacgcacctgtgaagttttctatggagacttgaaatgccagaggtggttgttagaatgcagggggaaggcatgctgtttgagtcacaagctcttcccagactcctccgggctttgggagagcaaagaacagggtagtgattggtgggcagagagccgataaccagaatttacatgctaatgtatttaacagaggacagagccaaggcttccagtatttgggggcctggaaggagaattgggcttaatttattccttttacttaagaaaatgactagttgtccacggggacaggacatggcctaaaggagatgccccagcatagatagaggacagccggtggctgctggctggaggtttgcgtgcagcgagtagtgtcttccattctgttctctcggagcttttgctcagatatatcttccatgtactttatttcctaattttcaaggcatttagaaatgatgtcagcctatgaaaacacttattgtgacctattgcccaacatgaaataataccccgtgtggcctcttcagacccttcacatttacctagagatacgccgttgactagggacaaagcccttgagacccttttctctgcatagccacgctcaaatctttctatgtattttaacaacatttcatgtcgtctgaaaaatgtgtgaacaaagttttcgaacttgagagaattttcagcttgtagtaaagcagggcctggggagttgctcgagttttggggctgtgtcgccctctagtggtagcaggctttggctgaaagctgtcatcctgccggagcgaggcaggagtgcatggtatagaagagatagttacaagctcgctggtaagttgctgaaacagagttgagtgtggtttaagtagctattgtccttgagctgccagtttgtcccacagtagacagagagttcagattggtgcacctttccagatgaagcccatttaggctgggtgaactgcggagcctactgtcgctccctggtgatcatttgctgttgctgacctttcattccgcgtttcctccggtctttgtctattcggtcctcacaccctgtgtatctcctcagtgtcccaccattttctgttctcttggaagctgagtgtatctttttctcgtctctccttttattttttccatttgtgtttttcttctgtcttaaagcttcacctccctttggtccttatgccatcaacatccctccctcctatgcctcctcgctgctgtgcctgcctcctacccctgcctcctatatacatggctccctctggggtcttcctggctccactcctctgggaacctctatgtacacgtatacactgcactccgtgacccttgacctctttagcttcaacagtctatacataccacatttctgggagcctccttaggcctctttgttctggtaacatctaaaatgtagatagatctgagacctcctagtcaatggtcttcattcctttcttacttgagattcctacttggaaacagaaagttggaccttggcatactcctgggcctaacttctcactcaggttccctaggtcacctctgcagctcagactcaagagccccctcttatgaataaacaagcagccgtaggtcccttggagagactccagcctgggttagacttcagttccctgttattccaaaaccctgtctggtccacagctgccacagtcctcctgtcagacattttcttacacctttaaggcaattttgtcagtttggagaaagccatttcgcactttacacattttttttctctctctctacccacatcattggctgatgtctttgttttttacaacattgagaaagagaagtcctgcattggtaggtcagccttggctttctagacacaaggcctatctttcctgcaaacagctctggctggaacatgccctatccaaggagacatctcaaggttgtcactcctaaagtaggctcttcccattgtcctgtctaaacgaagtcctcggttttgtttctcctcaagattcttccaaatgatacccaacaaacctcataacacttaagcgatgtaagtccaaattccatgttctgggcctggagaggtggccaggccattcagagcacctgttgctcttctggaggacttaaggttcagtcccagcaccatcatggtatctcacagttgtctgaaactctaaaggctctgacacccttctccggcctttgtgagcattgcgtgtctatggcgcccagatatgcacacaagcaaaacactcagacacgtgaaagcagttttaaaattttttagttttaaaaaatatttataatatttgtatgtgtatgtgtgtgtgtgtgtgtgtgtgtgtgtgtgtgtgtgtcacatgtgtgcaggagccctcagagatcagttagcagatcccttggaggagtgacagttggttttgggctgctatttggatgctgggaatggaactccgggtttcctacaagactaatgtgtactcttgactgatgagccacctctcagacccttaagaacaaatcaaacaaacaaacaaacaaacaaacaaacccatttactggctggttttatgtgtcaacttgacccaggctggggttatcacagagaaaggagcttccgttggggaagtacctccatgagatccaactgtaaggcattttctcaattagtgatcaagggggaaaggccccttgtgggtgggaccatctctgggctggtagtcttgagttctataagaaagcaggctgaacaagccaggggaagcaagccagtaacatccctccatgacctctgcatcagctcctgcttcctgacttgcttgagttccagtcccgacttctttcagtgatgaacagcaatgtggaaataaatgtaagctgaataaaccctttcctccccaactgcttcttggtcatgatgtttgtgcaggaatagaaaccctaagaaacccatgttccttagccaccttagaaagtgctgaccattcattggacagtacatccaccacccggcccctgcttcctttcctcttcttccacatcacatcactggtttctttcctcttatcttgctacttgccggttcccactaggttgaccggggtgaccagttgtcccttcttagttggccacatgtcctcctcacaccagacccgtttattcatcccaacattccttgtgactggtagtaaacctcttccagacttcttaagaggtgagaggaccttccctttgaagttgttttgatccaggcgatagagacaagtttctaggttcccacgcctacattgtggcccctgagccaaagatacaggcacccatgacaatgtgaaacctgtttgtttgtttgttggttggttggttgtttggttttgagacagggtcttgctacattagctcaagctagtgttcaactgagaatattcctaactccatctcttaagtgttaggattatgggaggatagtacaacgcctggctcactggggggcttgagttccaagataacaggtctgtgacataaacaatgaaatcctaattcctaaagcccgttcctttctccaccctcattgcctactgtcttattcatgcttcgtcagattacctggtgtgaggagggtgggcagtttggggtgagcctctctttcccaacttcagtgggcagacatggctcactctgattcttaaccaaggctctgtgctggggtgtgtaacccttgctctgtgtggcacagtgtggcggaggacacattgaaatgcctggagcataggatgaagtccaggctgaagtctgggaggctgagggcactggaagccttgctttctcctggctgaacttggcctctgggtcgccacgagcactctcactgtacagttaatgattccctacctacagtaaccgctccgctgagtgtgtcggatacagtgtggttagttccacgctgtggagcgcctgtcacgcatgcataacaggctgtgcttgggaagggggtgagtttggtaggaggtgagagctgcttgcagcgtttgttttcaaaacagaattccagatgacgcatgcgagattaaaaaaaaaatagccctgtgccttatcgtcttattcagcatgtctatgtgttgtgggttcagctatgatcactgataaagtcctaaagtcatttctgctgggttacaagggagttcatgtctgtatagttccctgtcaccaacagaaagagggaaatgtagtttcaatgacagtcatgtgcctttggcctccttgtgcaactgccctgaaattcgagtctagtagtgtctctgtcctggcttgggatcagataaaagaacagagactcacagtgaattcatcatttctcctggctgcctgtctcctaccacagagcacttaactttgcttcagctttccggcctgtgaccctgctaaagcaactgcctgtgaccctttaataaactcatttgtaaacatattattattattatttttattatctctcatgtgtgtatctgtggcctgtgtgtccaggtgacctcagaggtcaggagttggatcccttggactagagttacacaggttttttatgaggtgcctgacgtagattatgggaaccaaactcttggaggagcgcaggtgctgttaaccaccaagccgtctggccagcctcttgtaacaagctcttaagatttgtatgcaacaagctcatatatggctctcttcagcccatccgttcagggctgtctgttggtggctgtggcgtgaacagctaatatagtagaagacgcacgcccactgttggttcaccagcctttgaacttctgtgcccagttacttcttcctcataggcacttagaaagaattctaggagcagcagaaggaacttcaagaaacagaaagcaaagggggaccagcaccgagtgagcagttgctagggcctgttcacccgtgctgagcttttagtatctgagagtatatgtctacacagaattccagggtaatacaatatgtagtttggccaagaggcaattactttaattgtgacttgagtaatacttactgccttttagaaaggcacccttagcctgttctccccatcccgactgctgtaggctgagtaacccctaacccaaacaagcaaaatcaaaaaacgctgtgccaacacggccccacaagctggaaaaccaaacagcctggagatgttttctgtccagaatttttaaaattatgattgtgtaaaattaccttcaagctgtgtgcatgaagttatgtgttctgtgggtggattttgtgtttagaacagagtcccatcctcaagatgtttattgtgaatctgcaaacacaccagaaagcacaaacaaaacactgaaatacacaacactctggatgcatgccttttgagtgagggtcattcaacctgtaatatctattcacttgactctgttgagttgttttaactacacacacacacacacacacacacacacacacacacagagagagagagagagagagagtcacagggttttgtagtgggtctttttgacagtcattggagtgggaattgggaagggaccatcaatggaacacctttgggatggcttccatcactgggctgccacagaggaatggctgcaatggatgttgtgtttgagtgtttacattacttctgcagtgctgaatttagctcaacgcgcagctctgtgcaagagtaaacactgccgggtgtggtttgagtacatctgtaaccctagcagttggaaatcagaggcaggaggatatcaagtttgagcagcacccctgtactctccctcacttcccatatagccagccccctgtctcaaccacacagattaaaacagttttcctgtttgtttggaatgtcacagaaggtgcccaaaagccttagctttcgaagctcctgttgttaggtagggtacgattacgtggctccagcacgcttttagcagcttaattatcacgtactccggggtccgggtgtgaaaggggtcataataacagtctcagagttggctctaaggagtcatggagaacagtgctcggcagctgtggtgccgttacctgtgctgggcctttctgagcatctgtggctttgaggcttgggagccctgtgcctcaggagactagaatgagtgagcagctccctcagtgtatagctcatggtagctcaaacctaggctattcgtattggcttgaaaagccatcatgctagctctgaactctggctggagtaagtctctttctcctgtgcatttcagtcagctctttctcctagatgcctggcacctgggactcaggacacctcaggcgaacacctggaagggacagtcctaacagccgggaagaagttatttttgcctgagctctttgggagaccatgtgttctgactctggagtgctgatgggtttctatgcttaaataaaggttcctgttgattttacctggattggggctggaggggacaggaggagggctctccgctttgaaagcttgcccgtgtgtttccccctttcatatttactcagtttgaaagtttagaaggttttctgtggtccccactgaaccttgccctgcaaaatagataccatttcccttttatagtgttgggactcaggaacttcaacacaaatattctttttgtttgtttgtttatcaggacagggtttctctgtgtagccctggctgtcctggaatgacaggatatcctagtgtagattaggctggcctttgaactcagagatctgattgcctctgccttccaaggactgggctaaaaggtgtgtgccaccacacccagctaaggaatttattcttactgccctgtattcggtgggctgatgtgaatcttgactccagatcttcttagttcagatcatagcgggcattgatgatggagctatgatgatgaacataaccatgtattaggtatggagttaagctcctgtacctctttattttggttaccgttttagagagtttcttagagcacaggctggcctcagttcatgttgaagccaaggctgaccttggactcctgccactcctaccacacctggcctgttttttttttttttttcttgttatcttaacacaccaaagtgcagtgagcatactcttgtcttgtacatgaattagattaccctaaaggctgctgtcagtaaccaggagcggctcacacagcaagtatccaaaaaccattgggaagaactggaattcacatcaccctcatgacacatcctgagttggatgtaaaggccccaccccgacccagcccatttccccttcccaatttgggaatgcaggtgtcaaatacaaagaagtgggttctgggctcttctagttttaatttggctgtttttgtgatccatcagttcgagcaattctgtttccttcagaaaatgtcagaatgcgggactgggaaggtggcttggtggataagctgttgcacaagcatggggacttgtttttgatcctagcactcaggttaaaagcttacacgctgctagtgttccacagagagataggagatggagaaaaaaagagtcctccagaacttgagggccagcgtgcctagtgtacgcagcaaggagcaaaactcacacacgtcggaaggtgatgaccacacatgcgtcatggcctctgcacccacacttacaggagcaagtgaacacacatgtcacatacacacatcacacacacactttcttttttctaaaagtcagaacatctttctctctctttttttttttttaaaaattggttgtcgagggctggagtggggtgagcgagtttttgtatacccaagactggccttaaactcactgtagctagaatagccttgaacggattctcttgtcccagcctcttggttgcagaggtaggtcacaggctgtctcctccattcccaatttatggagtgccaaggctcaaactcgggtttcctgcatgcggtgcaggcagtctcccagctgagctacatctcttgtccgagtctgacgctttaccccaaatcgcctgcttctgtatttctgaaggcatcgggttgggatccttaacttgtttactgaagcatacaccagtgaggcagagaatggggaagggcgagtgtctgttcctttagagcagagaacaggggtaaaaaaaccaagcagcattagctgccttcagagctccacagcagcccccctggctttgctgatactctttccaagtgcggagcgttcccttcaggctgtagtttgctataagcttgtttgtgcctcttgggagccaacagtgctgaactactgttttctgtgcctcccttcttgtctgggtcgctcttctggatataaaatttatgttggtacaaaggctgtcggaccataatgagagataaaaaccactttgtcttccgagaagctgtgttaacatgggctgtgagatctcaggttctgttctcaaactttttgcagagcctgacctctggcctagttggacacagccaacctctttctagtaagttccacaccacttcttggcatttcttggggcactaacgcactgagttcccttccttggcattccttgtgcgtaggctggaatattcctccgcccttgatttgtgggctggttttgtttttgagtcacacatttaatgagaagaaagtcaaagtcaggtgagatgtggaaagaacgggagcatgtcacaggcgagatgctccagggttgtcaagacagtcaccgcgtgcatttcctgaagacactggatagtctctgcaccattgatgccaatacttctagtgctgttgtccagaaagcccttcccacctgtggctaattaagtgtggctgggtcccctgttggactcatctctttaccttctaaagagtggaaagaggattcaaatgcaaactcagtttgaaactctttgtgactagaggtaaaagcaaaaataaaataaaataaaataaggaagattacttacagctctctcgctgagggtgagtcatatttattattgtagatattaatagctctttctgggaagagttcctcgtctttagtcagcttgaaaatcaagagcttcagggagattccctctaccctagcagagaaagtcgagtctccagtaaggttctctgagcatgttctaccactgggtggtgataatgtcttctggatttatctgctgataaagtattcattccgcactatctgctagctagggtggctatatgtagtgtcatctgttggccaggagctctaccagcagagttggaggggattctcaatgagtcacggatgcataaaaggttgcactcaatgttgtcttcaagaatttaatttggtttgctgtgcaggatgcaggagaatgagaaggtcaggaccctggcagctcccggctgcagcgagtttgtgtgccaggaagaccctcagtgcagtgctttgtagtggaggaaacagtgacagaggaagacaggacagggggaaaatgtacaggttacagtcaatgaaaaatgaaagaacactctagagcaggggtcgtcaatcttcggaacgctgtgaccctttaagacagctcctcatgctgtggtgacctccaaccataaagttatagtcattgctacttcataactgtcattctgctactggtatgactcgcaatgtaaatatctgctatttccaatggtcttaggtgagcactgtgaaaagactgtttggcacccagagggatctcgccccacacaggttgagaacccgtactctggcagggcctagggattccaagaaagtaaggcagtaagatttgtggactgtgaagacaggctacttagctacagcactgtctagaacttgtctttgggcatatttttatgtatttcattgactccttcaaagtatatgactgagaactagacatgccatttcacaaggggtcaactgttgctgggcattaattaacaaatttatatatagttattttgataagcagttaaacactttctcatttatactttattctgaagttttagtgcctgctgtcgtcgtatgtttatataggtaaatataaaagggtggcaataagatatatattatttatatgtttataaatatagacaaatataagatggacaacttggcaagaatgtgtgtgtgtgtgtgtgtgtgtttataataataatataataatgcagggcctttgcatgctaggcaaatgctctaccactaaattatacctcttttgtcatagactggaaacatggttagtatggaagtatgatttagcaatacttactagatttcaaaaagcaggaaactgcctccgtgggttcagtgccccttcaagtctggaagtatactctgattgtcctctgagggacaaatgtgtccctgtgattgatagcccatatggcacagggcttctctctcattcctatggcattaggtgacacaccgtgtcatgtgttccatccatgtcaaagggcagggaaggagttctgtcttaccagcaggatttgctggcacagtgggggatggggctctgtgaggaggaggaggcaggccgccaggcatcagtgggaactgggtttagtagctgggaagagaagcttgggtccctgagggtggcgagaaaacccccagagtcctgagtctagcctcccatcctcccatcctcccgtcctcccgtcctcccgtcctcccgtccttccgtcctcccgtcctcccgtcccagcttcttaaggctgccacttccactacggtgatggctcttcctcctttatccccaaatctccaaggcatggttttgttgctacttctttagtttccccattatcattttcagtagatcagcttctctgtcctcccaccacatccagtactgttcctcaccagtacctgtaagtttggatttttgcattcaccttgtgactacgttggaaatgcccatggcgcatggctagggggtacagctaccccaggaactttcccttgcgaaccccggaggcaggaactgaactgaagcagaggttctaatgggacgctgcttatttgcgtgctttctggcttgctcagttggttttcttatacaccctaggaccacctgcgtaggtgtggcactannnnnnnnnnnnnnnnnnnnnnnnnnnnnnnnnnnnnnnntcttctaatctatcatcaattaaaaatatatcctacagacttgcccacaggccagtcctatggcaacattttcttgattacgttttcttcttctgcccagtggtaatcgttgtaatcaggaaaaaaaaattaaagtaacacatgtttctgagaaataagcaaaaagaacagaaaagaggatgctgggggtgtagctcagagtgctcagttggcagagtgtttgtctaagataaacagccattgcagtttgattgctggcaccttctgtacctatgtggtggcacaggcctataatcccagatttggcgggggtgggggtggggtggggtggtgaaaggcagaaaggtgagaagttcacggtcacttctcagcctcacagtgagttttcgaccagacaaacaagcacacactacacaaagaacaaggcacaaaataagaaagccttgctctggtttctcaggggccaatgaaggagaggatggtttctgtctgcattgcttaatgatcgatgtagccagcctgtgttttggtggagcctcttgttggttgagttgagacagctgggctggaggagtccagcttttggacagctgtgcaggacagctgtgcatgctcatttgtcatcttatgcctttcaaaagctgggagtgcaggggtaaggggctaggggtgggctcatgagaccacagctgaactgccaagtttggtgtgtggctgcagtttggcatgggatgtcagtggtgtgggagggagtggatccaggtgagaggttggtaagctatgcagatttggttaaggccaaagtataaaatttctacttatagttataccgttcgtcttgccagtaaatgttggttcagtgttaactgtactggacaaggtcaagagcagaggcagggaccagttaggaggctgtctaggtcatcccggggagaaatgctggcagcctggattaggattggagcagctgaaggttgctgtaccagtactcagccccagagggctctggaccagctagggtcaggtgtgtggtctttcagctgcgttgaggaagttttgccagagggagacatggaaggttctattgcaaaacccagggcttctcaagtctttggtgaatttgcgactccattagcatcacagtttcggatcccactgttgtctcacaaagagccatccgaataaggagattcagtctgttcccttgtcacgtcacaaagctggtttggtgatgtctgctgtgaaaattccaatcagatgtcttctttgtgtagaaatcaatggatccttttgtctgttcctttccatttttagtggtgtattttccatagttctctctctatggaggaatgcccttctggcataatgtgtccccccccccccttttttttttttgccacagagctgtgctgctcactgcagccttgtgtgctggcttggcctgggccacactcaggtctctaaaggagtgaatgcaggtgtagtagccttgattctgaattgttgtgtgcttttctgagatcaccagtggctttaaagaaaataatcgagcatgtcatctggtccaggtgactgtcatgtgattatcaataacttggctctgatgagagtgaaggatggagagtggctttgtgggctgacggacctgagatagagacctagtttccctgtggcaaacccactgccttttggcctttgggtgaggcaggcggatttctgagttcgaggccagtctggtctacaaagtgagttccaggacagccagggctatacagagaaaccctgtctcaaaaaaacaaaacaaacaagcaatcaaacaaaagacactgctttggatcatgctagttatgatgagagggtagtgttagcaggattggcgatggcgctccctccttcgctgattatgtcatctatcgccttgcatggggaggtgaacatgcttttttttttttttaagatttatttattgttacatgtaagtacactgtaactgtcttcagacacaccagaagagggcatcagatctcattacggatggttgtgagccaccatgtggttgctgggatttgaacccaggaccttcggaagagcagtcagtgctcttaaccactgagccatctctccagccccaagaacatgctttaaaagtgggagagacaatgtgagggctgggaatgcagctcattcggtagatgcctatctagcctacagggagccctccgtttgatccccagcaccatgtagaagttgatgtgccagtacacacctataataccaccatttagggagtgggagggtcagaagtcccgggtcatccttgactgcaaggcaagatcaagaccagcctgagctactttggaccttgtttcacaaataaaataacaatacgtcattcagattggggaaggcaggacctcttcattagtagtatctcagaggccactgggatagttggggcagatttttttaaaaggcgttttgagctatgcaataaaacagtaccaacttctgctaatggcactggcatagcgacaatatgaaaaaactgaagctttcctttaaaggtggtttgtttggtcttttggaaagagtaaagtacttaagtcataccgtgtggtggcgattgctgatgggagcattcttcctctggtcagagagcaggagctgattttctgatcatgtgtgcaaatagcatagttagcgcgaagaaggttctggaagcttagcatggtggcacgtccttggatcctcgtatcacaggacccagtttcaagaaacaaacatacagggctggtgagatggctcattgggaagagcacccgactgctcttccgaaggtctgaagttcaaatcccagcaaccacatggtggctcacaaccatctgtaacaagatctgacaccctcttctggagtgtctgaagacagctacagtgtacttacatataataaataaataaatctaaaaaaaaaaaaaaaagaaggtagtttatttaaaaaaaaaaaaaagaaacaaacatacaaatgcatcaaaacactctattgccttttaaaagttagcactgggacttatatttgtgtatgtggtgcatattaatgtccatgactatgtccatggtgtatatagtatgtgtgtttatatatttagacatgtatgtatacaatatttacatatatacccatatgtctgatctagccacatttctacacacttcaccgaacttacccatccatttagtttaaatatagctaatataaatatttgaaaagtttccataacctttccccagtttacaacttagagtgagatgtgagatggcctgaggagtgtctgcatcttcctggtgaggggtttggtcagctggcatggtcagagattcctggggcattttagagcccagcacacgggctcatgaatatcccaaattgcagagggttgctgaatggcagagtttgaaactcaagctacaaaaaaaaaaaagtttctggaatattccctgctattgtgtttcatagaaatgctacctttactatatctcttattattgtcataaggattcctagtcatttaggaaagtatcctttttactttccattttagaagccacattccaggaagacttaaacttcagttggaagactttggaagtgagaatttaagttctcatctccttaataatcacagttgcaaatcccagttttcatttctgttgatttttaagctcagtttaggaagactcttcatctcaggcatttgtagatgaccaagtcacaagtatgtgggcactgttgacctacaaatgggctttgaatcagcatggacatttctctacggttggggacaaggcagtgtgcacagtggatgtgcacctggctggtggtgaggtgacctggctttttgtcctgagttgggagatgctatgtatgtgcagatgcctctgaaccctaggcactgtcctagtgactggtatcactcattctcccaccaaggtagatagatggccaggatatgtatatgttatatctctgtgaattggtaggggcgctggaactttatggtgagcctattgtcagagagctaagaaataactgaatatacttttctaaatattaacctttaaaattttgtactttgtgtgcacaagtattttgcctacatgtatgtgtatataccatgagtgttcaatgccagggagaagccagaagaggatattgaaccccatggagttacagttgtgagtagctctatgcaggaattgaacctaggtcctctggaaagagccagtgctcttattctctccagaaccctatagccggatactcttgacctcatgccatgaccctggacccagctgtgttagaggactggtgatatttcagccatagtatctatgcctttgccagaaatgtctctcctgcaactaagtctatctgcaaagaggccctgatagttgattgttcagtttttctttatctgtactaaggacagtgggctccaggacagactattcagagcttggtgtcattctgtcttacaaacctggtgtcaacaatcaagaagtgtttcagttggcaaattatgctaacaatagagagcattcagcaggagatatatgtccatgggaactttggtggcccatgtttggtatcagagagatggtgggttttatggttaaaaatgaacctggtggcagtagggtggctactgtctgctaatggccctataaagacttgcataggtgttcatgcctttaatttatttttaaacaaaatattgattctatcaaccccctccctttgtttgtttttggagttggatctttttgctatggtaacatgatgctgtgtcatctgcagaggtcatgctagtgcacttggcaatcatggtcccagaagaattgcaaaagccctccagaatgttttaagcaagtccaaagtctgtgatcttgggttgggcttcatctatagctgcctttgacctcatgtgggttgcaaggtgtaaactggacacatctatcatcattgggcagttgatagacaggccagggtggatttggaattgagacacagtggggggaaaaaaagcctctaccacgtgtcacccatactggtttcttttctgttgctgtgataaaatactgtgactaaaagtgacttatggaagaaaaagtttatttgggcttataagaccagaggattaagtccataatatgagggaccatgtggctgcaggcaaccagagcaggaggcatttttaactgaaggcatgaagccgagatagcaaactggaggtagggagaggccgtggaactctcaaagaccacccctagtgacatacttcctctagtacagccgcatccccagacagtgccagcccctgggaactgggtgatcagattcctgagtgttggggatatttctttttcttttttcttttttaatatgtatttttttattaggtattttcttcatttacatttcaaatgctatcccaaaagtcccccataccctccaccccaactcccctacccaagtactcccacttcttagccctggcgttcccctgtactggggcatataaagtttgcaataccaaggggcctctcttcccagtgatggccaactaggccatcttctgatacatatgcagctagagacacgagctctgggggtactggttagtcatattgttgctccacctatagggttgcagacccctttagctccttggatactttctctagctcctccattggggccctatgttccatccaatagctgactatgagcatccacttctgtgttttccaggcactggcattgcctcacaagagacagctatatcagggtcctttcagcaaaatcttgctggtgtatgcgatggtgtcagcgtttagaggctgattatgggacgaattcctgggtgcggcagtccctagatggtccatccttttgtctcagccccaaactttgtctctgtaactccttccatgggtgttttgtaaagggtggtttttttgttgttgttgttttgttttgtttttctggtttttgttttgtttttttgagacagggtttctctgtgtagccctggctgtcctggaactcactttgtagaccaggctggcctcgaacttagaaattcgcctgcctctgcctcccgagtgctgggattaaagatgtgcgccaccatgcctggccttggggatatttcttattcactccactacattgcccttaagtagtaaatttgaaggcaaattccactatgaattacatgtctcgggcactggtgtgtatgttctgcactgttttcacacagagcaaattctgcagttagctgctgatcattgtcagctgcaccagtcatttaatgactcagacagcattttcctcttttggaaagtccactgagttttaaggattaaatggcaaaatgtcaaagtgtggtcactttatcctagacaacagtacctgttgactgtcaaggtgaaagtagttgctgcaactgagttttctaatactgttagctgtatagcaaaagcgtgagtctttctccttagtgagcgttcttatattataaatgtatttctccgatgcttcgtgggagaggctttgagaagtgctgtctgagtctctccctcagggctctgcacagatttagcctcattgtttgatacaccacatcagctctccttcagatagagtccctccctgcccccacatgatcaccagttctgggcggttttattctttttacaggttgttaatcccatggtgttttagtaaaggtttctattgctatgacagaattccatgaccttccatatcactgctcatcagggaaggaagtcaggacatggactcacacaggacagaaacgtagaggcaggagctgatgcagaggccatggaggggtgctgcttactgccttgcttctactggcttgctcagcctgctttcttagaacccaggacagctaacccagtgatggcaccacccacaaagtggctgacccatcaaattaagtaatttaaaacaaatatcttataggcagatcttgtggaggcatttacacagttgaggttttctcccttcagataattctagttcgtgtgtcaagttgacataagaccggccagcgcaggtggtttggtaaaacatcctattggttttcgcatttattggtgagcttgatattgtttcctggagacacaaacggagacagttctactttgggatcaagactgaggaactaaacagtccgatcagcggatgggttaatgaactaatagttctgaaaagatgaagtacaaatggctatagacacagaaaaaaaatgttaaacattcttagtcatagtggccaagcagaataaaacctcaaggagattccttctcaccccagtcagaatggctgtcatcagaaaatagctggtgaaattgttgggagaaaagagggcacacaccccgccctcctcccctccccccccccagctgctgggagtgtaggttagcccaaccataggaaatcagtgggggactcctcaaaaatcaatgctagaaataccacatgacccgggcagaccgtttctggctgtttaaagaatcctaaatcagcctgtcacacagatactcccacgcccatgtcgactgcagctcttagtcacaaaacccaagtcatgtggggatggcggatggaggcataaagaaaatatgaatatggtacatattcacaatggaggcttatgcagccataaagggaaatgaaattgagctgggcagatgactcagtagataaagtcgttgttgtgcaagtgtgagtgcctgactttggatccccagagcccatcagacatggactgtaagcatctataagacactgaagcaagcatctgtgatcctggcaactcccacagagagaagcagaggcaggagaatctggccacccagcctgctgtgtgcttctgcaagtgagacccctagcctttgcccatactcatctacatacacacagtggggatggagaggagaggaggagggacggagagtaaggggggaaagacccggattgtcatttgcagagaaaatggataaacttgggtagagccagaccccggcaaatattacatgttttcgctcactcacagattctagatttcatgtaacacacaggtatatttgtatttaggacatgaaagtagagtgagattgtttagatgacggggtaaggggatagagaggaggcagaatagtgaaggaggaggaaacaggaggaaacaaaggaggaaacaggaggaaacagaggaggaaacagaaggaaacagaggaggaaacaggaggaaacagaggaggaaatagaggaaacagaggagaatagaggaaacagagaaggaaacagagaaggaaacagaggaggagacagacaaggaaacagagaaggaaacagaggaggaaacagaggaggaaacagaggaggaaacagaaggaaacaggggaggagacaggaggaaacaggaggaaacagagaaggaaacaggagaaaacagaggaggaaacagaggaaacagaagaggagacagagaaggaaacagaaggaaacagagaaggaaacagaggaggaaacaggaggaaacagaggaagaaacagaggaggaaacagaggaggaaacagagaacgaaacaaaggaggaaacagagaaggaaacaggaggaaacagaggaggaaatagagagaatatagtcgaagtatatgatgaacttgtatgaaattatttatttatgaaacccagctctatacccagtgaatatacatcaaaaacctaaaaataactttttaaagagcttgagctggtaaggcagttcccagcttattctaccaagcccagcatcctccctgccacaccagcatccattttctccacactgggtggggcaagggcacacttatctcagggtttgctatgagatgacaggaaagtgttcagttacgggcctttaggtgggtatgggcttggctcctgtcagctgttggataggatgggcaggaggagaaggccgacagcagaggaccctggagtgaggtgttcagagaaagagagagccgtgaaggtgcccaagttcagtgtgggtgtggatgggggttcggggtgggtggaaatgtctggagctctggaccaaggatgctataagggcagaggccttagtgtgatctaggacaatgcaagatttgggtcccatgttagtgtgacacagatatctgtcacttgcgaagatgggacgggcaccttgatagtggctgtggataaggaggatggatatggtagctgtgggggaaagttccggtgcctgggcttgggaaccactctcccaggcctttctccggagccagccctggttgtaatcaagtagctggggagatgactccattgttaaagtgattgctgtgtgcaagcatggggacttgggccagtcttcccagaaccctcgtaaaacaagtcccaggtacctgtcatcccagcatgaaggaggaagaaacgggaggattcctggagttttctggccagatagtctagaatcctccgtgttcatcaagagactctcagacaataagatggaaagcagttgaggaagacactggcaggcacacatgtgcacatgaagacatgcagcagcagcggtggggagccatttagggataacgatgatgtggtataggagctggagaggcagagaacaaccagctcatggtgggctcttcctgtgttgtccctggcctctcacaccgaggggtccagggtttggtctggcattttgttctcggcatctcattattaataatggttgaacggggcttgcaggtttcattttgcagtgggcctttgaaagttctatgtctgtccttaagggttagggaattgatgggaggttggctgagacgtaagctgaacacaccactcgagtgtggactcgggttggcgtgaacaacccgatgaccaggagaatggtctgcaggttaccttacgtaaaggtagaatgatttcaagtgggcgagggatggcaaagcaccattcctgtaggtagtgcttggaaggctgaggcaggaggattaagagttcaaggatataaaatatccaaaaatatagaaataaaaaaatcgagtcaaagaaaggttgccatggggagtatgcgctgcctttggctacagccccgagctcctctaaatctagcagtgctggtgatttgaatagaaatattctcttttaaagagctgtcctgtgcctgggggtatattcaacacatcctagcagatgcccatagcacgttactacactgtgatagtaaaagccatcttcatacagtcccatgatttccttttggggtataaacccacccacccctaccccagtggcaaaaagccttgctctaaaaagctctgagctctcttgctcctgttcctggtttcccttccaaacccccctcccctcccctctccccttgggcgggttttttttgttgttgttgttgtttttgttttttgttttttggtttctggtttctccgtgtatccctggatgtcctggaaatcactctgtagaccaggctagccttggactcgaagctcagcctgtctctgccttctctagtgctaggatgtaccaccaccgcccagctcatgagcaattattttagtgtgcctttgcccatgtatattgtggggctgacccctctgccctcttgtcctgttttgttctcccttgtgagtaagaatgcctgtgagctccttttcttgtgcctttcccttggcaccaaattctacctttctccatgacacccctactcctggcgtctttgatatatgatcaacctgctgtgttctggccatgctcctgagacagagctgcggtctgagtggagttggctggccacgttgttcctggccaagagctttggacccaggagttcatctctgcctttctctgagtaatcatccaactccacagtgttttgactctgaagaatgtcctgtcacatactgttgctttgcttcttagctcatgattgttacaatgccggtctctttctgcaataagcaaagaccccatgttagctggctcataatgctaattaacttctcaaagttctgctactaggtcacctctctaaggcagcagttctcgacctatggggttatgaccccacgggtctcactggggggtcacatatcagatatccttcatatctgatatttacattatgattcataacagcagcacaattacagttatgaagtagcaatgaaataattttatggttgaggaacaacatgaggaactgtatttaagtgtcacagcattagggaggttgaaaaccactgctctaagatctttcttcttagagagccgatggttaaccctcccacccctgccctctctctgtccatgtgtgtgactttggtgtctttgtccaaatatcctccaagaatggcaccaggcacattgggttagtgtcccactgaacactgggaattagcatgaccaaggatgaatttttaagcaatattttagaaagtgttaccttaaaatttttattcatatgtgtggccatgcgtgtgtggccatgcatgtgccgtgcgtgttgcctgtaactcagaggacatacttatggaaattggatctctccttctaacatttggtcttcgtaaatttaactcaggttgtcaagcgagatgggagaaggatggcctttgattgggagaaggaggacattgattgtttgtcctgcttaggaacagtgttgacccttttgtcgactggtgtgtgtttgcataggctgagagagacagaggagacagtttgcacaaggtagagatgagggttcctttaagagtgtaccgccaacgtttaccgaaggaggagggatgtggacaacggatgttgtcttcccaggactgttctgactctgttctcagtgcatttggaagaggccaacttgacagggagtctgaactctggcgtccaggtcgaaggctctttgggcacctgggatgtgacaattacaggtaggaaggtaggcgtggttcagagcaacacccagtgtgtgcggctcctggggttggaattcaaacttcagttctttgaccttggcaccaccacaggaggaaagttaccaagccgcaggccagcctggtgtagatgcttcagagcacacggataagagttcttgactgtctgcttccttcatcttcattgtgtagaactttttcctatgaaagtcatcttacctccaagagagtactgatgctgggtaaggttcttctccatgggagagaatggctcaccctctgtggcatttaaaaactctgtaaatccatccacagttataatataattttatagtacttcaagattctcttaagaatctttttagtattaagtgtgtaatatgtatgtgtggacccccttctcttcccccaccatgtgttgcatgtatgccattctatgcatatgatgtgtgtgtgtgtgtgtgtgtgtgtgtgtgtaagttacatgcatgccattctatgcatatgatctgtgtgtgtgtaagttacatgcatgccattctgtgcatatgaaagctaggactttagatgtcggtcattgccttatcccctatttgagacagtctctggttcactgtgcttgcaccaggctagctggcctctgaatgtccagggattcttccacgtccattattgcatagctgtccacagctatgaattcaaactccttctgcttatacagagctatctcctcggtgctggtgcttgtaagcgctggggatcaaacccagggactgaggcttgctaagcaagcactctcccgacctaccacagagccacatccactgccctacgccaagatctttgagctactaatactttatcaaggtagtttacttcacttacatcttgctccaaggatcttgtgtagacctcaaggtggggaactttatttagtaagggcgattccgaaagggcctggctggtgttctaaaggcaagtgctgctttgggaagtaaatcgagaaaaattaatggcttgaaatggaatgactgaacactgaaaattgcgaatcgttttccttaccagtgggggaggggggaatgtttatctctggacatttatcagctgtgtagtgagaactgaagtatttctgtgggtagcagttgagttctatgtggttcaggctcctttggagttttcagtgttgagacttgctagggtatgtttgaaagagtggtagattttttttttttttttttgtgaagtatcccagtgtctcattatttgcctgttaaaatagtttattaagcatcttagtggaattgtccagacatatctttttgtgtccctaagggataacaccttttctccaatcaatatctccattcacctgctgtttattctgccagcctgggctatctgtgtttctgtttttgataaatagtaccctctgggttgaaactttggttcccagtgtttaaatagaaaattaaatgcactaatggctcaggctgacaagaagcattttaggcagctagagcactgtgcgtttgctgaggagtagagacagagtagttgtccaagagggctgtggtgacttctgtggtgccctgtgtgggttgccgcagctgtcttggggtgggcacactggttggcttgcttgatcatggtggctgtggttaatccaagtttagcaggagaatttccattcttggaggaggactgatgttctacgggccccctatttgctgtggtcttgtctcacttcccctcctgccccaggtgactgaaagtaacccttgatgccccagtttgaaaaggactttgaactttggctctaatgggggagttcaaggcacatctcaaggaggtggagagattggaatctaactgatttttaatagatctcttagagatttcataacttggcttttggaaatcctgtttcaaagatgaattccttaggtgcttgcctcaaatgattcttaccctttgcttgtccatgggtctcactggcccagggcgctggggctgggccaagggtagtaatcatgggcagtgttgcacattgctgctcagctttacccagcacccttccttgctttgcccaccttctgttttctttcttgagtttatctccttggttagagcttagcatcctcgccttgtttcccgatcatgagtcatggcctgcttcacaaggtcaccggtgaatggtcgtccttctgaaaagtacattttctgttgcaaagaagatacttaatagtgtttgttaagcagaagggcaaagtctagagtcaatatgaatatacagaattcatcgtagctgggccattcaaaggatggttctgaaagatgaagctgtgggccacgtggaagctcagtgtagtatgtatgaatgaatgtggatatgcacttctgtgtgtgctgtgtgtgtgtgtgtgttgtgtacacgcacttgctcatgcgagtgctatggagggaagagattgacctcctctggagctctctgctatattttactttttctttttacagtgagctcactattttggcaagactacttgggtcttcaattccattgatgactgtgtgtgctttgatgccaatgccatgctgtttttattattataactctgtctgtagtacagtttgaggtcagggatggtgataccttcagcagttcattaattacttaaaattgttttagcaattctgtttttgttgttgttgttgttgatgatgttgttttgggtgtgtgtgtttctgtatgacgttgaagactttcaatttccctgaagaattgtgttgagattttgatggggattgcattgaatctagttgcttttgtaaagatggccatttttctatttgtcctggccatctataagtatggaagatctttctgccttctgatatcttctttagtgccttaattttttcattctacagtctttttcttgcttgttctctccctacccacccgtttatttgtttgtttgtttgtttgtttgtttttggtttgtttgtttgtttgtttgtttttgtggctattttgtgaaagattctatttccaggattctttcctctgcccacttgtcattttcatataagaaggctaattatttttgtgtgttagaaagtgttcatcaaatgtagaattttcatgggggagtcttaagagtctttgatgcataaaatcttatcatctggaaataaaggtatttgaaatcttcttttcatatttggatccgcttggtctctttcagttgtttagttactaagacttaagtaccatattgaataggtgtggagagagtggacatccttgtcttgttcctgaatgctttgaatttctctccatttatgttgatgttggcaataggcttgctataaatcaactttattatgatgagctatctcccttgtattcctgctatctccaggacttttttttttttaaatgaagggctactatatttcatcaaaggccctttctgcatctaatgagcctatcatgtggggtgtttttgttgttggtggtggtggtttttttttgtttgtttgttttgttttgttttttgtctttcagtctgtttatgtggnnnnnnnnnnnnnnnnnnnnnnnnnnnnnnnnnnnnnnnnnnnnnnnnnnnnnnnnnnnnnnnnnnnnnnnnnnnnnnnnnnnnnnnnnnnnnnnnnnnnnnnnnnnnnnnnnnnnnnnnnnnnnnnnnnnnnnnnnnnnnnnnnnnnnnnnnnnnnnnnnnnnnnnnnnnnnnnnnnnnnnnnnnnnnnnnnnnnnnnnnnnnnnnnnnnnnnnnnnntagaggctgtgtctgtacaagttctctaatagagatcctgtcttacaatttaaataaaagctaagtagacagcttgacttagtttcacttgaaattaagagggggctggaaaagaggttcatggttaagagtgggtacgggtcttacagagtcaggagactcacaactacctgtaactctagctctaggtggatgctatacctctggcctctacatgcatgtgcacgtgtacacacacacacacacacacacacacacacacacacacatacacacaaacacacacatccttcacaccacacaagaagcccaaaccctgcaaattagatcatagatacaacctctgattggaagtaatttttgaggaaactggtcaagctaattcatttctgtttcaccttttttcgtttttgtttgtttttcaagaaagggtttctctgtgtagccttggcagtcctgaaactcactctgtagaccagacgtgtcacagatgaccacctgcctctgcctcccaagttctaggactaagtgtatgccaccaccacccagtctctatttcacctttgtaaaggtgtgagttgaaacacaagacacatttcagaagttagggagtagaggtttctcggaacaaaagttacctagttaatatgttatccctgtttgtctctgtaatgagactgcatgcagaggctgtggatacattcagtgtagtctgatggtggctggtcacacatttgaaggagacgggatcatagaagcatgggtctgtgaagtccttgcacctttcaggctaacctcctccccaaggcaaggctagtgacttggaatgtgctagcattcgagatgagaggcaaccatcctacattccccaggctagagagaagaagacaagaattaaggatatgttcaaagtctggcttggctttgggtgtctttggccttgcatgacgatccatgccatcctcatattctctggcctttggctggagcctgtagctctctcactctgttgccctgggccttggggccttctccatgtttctgctaagtccgctcagtgcccactgcagtgcttcccgtggccaggatgatcttcttgctcttgcctagtggtgattctgcctttgttttcatagggtactgcagggttggaggtggctggactgctctcctaggctgccttgtcacatttagaccccgaagcaatgcagtacgagtgttggtactcttcctaagaggattttccttttcagcagagtgggctctgtactgtaaatcatttttggagtgagaacagtgagacacagaactcccaaacgctgtaaacgtagactagtatttcattgccatgttcacgctaattgcagacagacgggaaggaagcctaagcttttgaatgccgtgtgcgccgtgaaggacgtgcgtcgtgttcattgttcccgtgcttgctcttgggggagccccagccctctgcgtctcaagtactctgtgatgtgaccattcctactgagatgaaggtctgccaacattcgggaatgaggagggaaacagagaccctctggtttagttcctgcccctgtcgctgtgtctggtaggatgtcagccttgctgtctggttagaacaaactagggccatcccctgttcctggaggccacctgttcccaataggactctggtaaggaccagaagctccctccctgctgtgaagcacatctgctctgtgtagctttccccgaattcagcttcctccccactcccaacagaaaatgacctcactgttctggtcttttcctgtagaaagaatgtgcttgctctttctttcttccctaaaccacgattaaacattcatatactatttttttcaatagcccttttaagcttatctatgagtgttttgcctgcacgtatgtacgtgtaccttgtcatgcccggtcccaatatctgaagaagggtgttgataacccagagttgtagatggttgtgagctaccgtgtgggtaccaggaaatgactttgggtttttagagcaacaagatgctcttagccaaagagccatctctctaggccctcttataccatccttaaaatgccttttgtcattttggttattaactatcctggctactcaacacatgtttttaagttcttaatataatttgatggttttaatgtcaaagagtcaagaagaccacacagggagaaatcttctctttcctactgcctgtgaccccagaatcttccagggtcaacaggttctcgtgtccttaccgagttttcaatatgaacttgcaagcaaatatttgtgtttaactgcttcctcctctccttctgatataaatgctgtcagacctcacacaatgtcctgacttctttttttaatgtgccagtctattttggactgtcagtcacacctgtatgtacagaacactgccatcctttcttaggttggcttggttccgttgtatacatttcaccctattaaaaaaaaaaaaagcaaacccacagtgttcatcttaaatcctgactcttaggttttaagcatcatgctggctagggcagttagaatgaaagcccttggtctggcctgggaagagtccaaaaggctaccctgtcctgccactcagttatgtagaccttgagaccacaaagcccccaagatactacaagcccccactttgtttcttctgtcctgccttttcttctgaggtgggcagtcattgcacacaccaccacagaacccagcctgtgctgtttggcccattacccattccgatgagagccttctggattctgatgtggtcatctgatatcttaggcagtttgtagatccactgtaaattgtattagcctgctgtttgtgtccccttctatgctctcctgtctcagggcattgtgttggatggatctaatcacaggaccctgtgtctttccccaggaccttgctagcatttctaatgggtgtaatttggataggagctggcacctggacacagtggaactctcattaactctgctgtggctataacttcatgtgatcgcctggtccagagaaggagtgaaccggctggtggaagtcctttcctgctctgttggcagcacatcctaaagctttaatcccatcagaaaaggaatttcaggggtgcttcctccttcctttacctcctggcagctcttgggatcaaactcagaattttatatgtgctaggtgggtacttgggccagctgaattatatcaccagnnnnnnnnnnnnnnnnnnnnnnnnnnnnnnnnnnnnnnnnnnnnnnnnnnnnnnnnnnnnnnnnnnnnnnnnnnnnnnnnnnnnnnnnnnnnnnnnnnnnnnnnnnnnnnnnnnnnnnnnnnnnnnnnnnnnnnnnnnnnnnnnnnnnnnnnnnnnnnnnnnnnnnnnnnnnnnnnnnnnnnnnnnnnnnnnnnnnnnnnnnnnnnnnnnnnnnnnnnnnnnnnnnnnnnnnnnnnnnnnnnnnnnnnnnnnnnnnnnnnnnnnnnnnnnnnnnnnnnnnnnnnnnnnnnnnnnnnnnnnnnnnnnnnnnnnnnnnnnnnnnnnnnnnnnnnnnnnnnnnnnnnnnnnnntgatctttgccagatgtgggaggactgtcttgtgctgagccacgtgagggtcaccttaggggctctctggccatgagaggttacatgtgaccccttatcctcatgagctgctctatggcccctgttcccgagggctttatcttcaaggggaaagctctttggaaagcactgaaaagaaaggaatggaagagtgacggtctactgtgggggtcatggaagaaggacttaactggcctagggcccctagagaggctgttcagacacaggggtagtcatgctgaccttcacaaggcaagccgactgagctctgcagcaaacgggcagatctgcagaagcatggccatcagcagttgcacctgtagatcatcttcagaatcgtaacattttgtctgtggggttgggatgtgcacttgtccctgccatccaccagagaacaatggaagtgtctctcagtgactatgggtatgtcttcatagagagccagtgggaaagccaggtaacaggtgctgtccctgggtctcaggtcctgaaacttggctttgccacttgccttccttttgttcacagtggatcggcacagaatggcttccagctgtagctcatatgtggatatgtgctccacaagggaatcacacagacccaggaactagggttggaattatactctatatatgaacctagtagcaaatgaggtagtaataggagtaaattcaaggattatctatgtgactaaaggaacagaacatctatgatgccaacataggccacttgggcgctgtctgtagggtgtgtgtgtagggggagttgtcagtcctgttgtagggacagaatagggcctggtcgtggaagcaggcggctgtctgaggtgtaggaagtatatgagtacagaggggcctgtccagtggtaagtgcagtacttgagaagcagcggcaaggagctgtgtagatgtgccagtcaggaaactgaagccttgctccgagcctgtgcacaccaggcagtgtgggttgaactgcagtttacccacagtgaggatgctcgccatctccatgccttcccatctgtgcagtttcttgctgcaagagccacgcctgacacttggccaaggctcttgggcagtccctacatgtgtgccgctctaaccagagtcatacttcttgttgagttttatctctgaggcctggggcggggcatcttcttgagggcccttgggaccctggcccctttccgttcctctctattcagagtatacattccaacctgaaccccagacctcaacttttatgagaggtcactcacatctgccatgaaaaatgcagaattttagctcctgagctaatggctttggactgtaaaacagttctattgtttattacggtcatttttagaactgtaaacacaagatgattctcagtgatctcagaggaactcaaaatgtttcctgtgttctgattagagggacggaacaaaagaaccattgacaagcagatcctccgaaaaccttttacagggatttggaccaactatccggtagaaaagaatttttaattaaccgacgaaagccgccatctgggttggcatgttcgtgggtccttcctttcatgcccttggttcggtgactgcctcctctactcttccataatttcagattcactgtggatttctgacatgtgatcatctgatgttgctagctggggtcactgccaaactccacgtccactgggaagaacttgcttgttctctgtttggggtgtattctgaccacataccatgtattctgaccagactgtacttctgtattccaaccaagtaccataattgacagcccccgtagcactgagctgtgtctgcaaacctctcttaactttctagttttaaagcaaggtctcactaaggggtccagggtggcctttcatttgcaatccctcttccccagctttctagattgtcggaaatatatgtctttttgactggggttagctagagctatctatctagctgtctgtctgtctgtctgtctattcacctagccaccaatccatccatccatgtatatcgttgtgtgtgtgagttcaggcacacctgtgctgtggtaccgtatgtgatcataggaaaatgtcccttgcggactgtttttttgccttctaccttgattgaggtagcgtctcctgctgtgtactgctatgaacatccctaggcaagcatctaaggattgtcttctctctgcctcacatctcatgatagcagcaccaggactggagacattcgctgctactcctggtttttgcttgagttcttctagagattcgaactcaggtcttcttctttacctccatgacaagttttgtttgtttgtttgtttgtttttgttttttcccccctctaagcagtctgcctggccacagacctttcatttttgctaggacacagtggggggatatctcttgacatagtgctgagcctggcccccactccctccttagccttccgcttgctttcacctcaccagctaagctcccttttcccaagggatggagcttatgggtgggatgatgtagaacagggaagcgggccaggaactcaggttagccactttgaatgccaggctccgctttccttggagccagacacaaaggcatctagtgttgtctctgcgggaagaaatatcacgtgagcactttgaagtcatgggtcaaagagtattgagttcttcgtgcgactcactgtgggcccagtgatagtagcaccggaagattagtcagagtggagagccgttgggggaatttgccgatcaccaccacaaagcttttctgatgcaggtggctgtggctgtggcctcagcagaccctccctggacacagttcctagaagaccaccttgtcgtgtatttggtttctctcggagcatggcttctcctttcttgccagggtcccctgaggtagcttggaggcagtctcactcttccttcaacagtttttagtccacttgagtttcagttctagcttcctgccagcctgcttcctctgagaattttccagaatgttgacagttctcataaaagggccagtgcccccagttgggatttttacctgtttttttttgttcttctttcttggtgacttgattggggtgttgtgctggactcacaagcagctttccagtctcctccttctttttttaaaattatatttattgtgtgtgcctgcatgcgccatggtgcatatgtgcaggtcagagggtaaatgaatggatagattggttctctctgtctaccatgcaggccccaggaactgaactccggttgtcaggcttggcagcatgcccatggagctggcttgcgttttcacccttgttaactttacatgtgtacagtgatttttttttttgacgtgtatacgtgcagcaagatgtcactgttactgggctttagagccattggcttgcaagcatgcagctctgtctgcaaaattttagaaaaatttaaaaaacactggcccttgaccatgcagttgaacgggtctggtctcattcccaggttactgactcccacaggaagcagtgcttctgacgagttctaagttctaattctctctgccctttctcctccttaccttcctctctcccacaggagcctgctcaaactcctgcagcaattctcacattgaagacatgactgaaattgagaattcagtatgttagctccctgtggctgtgaccaaacacttgagacaatcagcctgaaaaggaaagatatgcatatgatttagatatgcaaatatatatgtatatgtacatgtacataggtagccctcagtttgggaggtttcagtctcattgctttgggcatgtggtgacacagtgcattatgggggaatacataatgaacaaagatgactggctccacctcacagcactgccattgactgacaagcccttgcatttacacattgacctttgaggaacattccatattcaaaatatagcactggctcaatctcatggctgtagagaggaggcctcagtttctctccatacaaacttataacactgtggctgcttctgtccccttgtgaggtggcagggtcagattgggtgtcccatggcctattcttcaaagtcacattctgttaggtcctatatattctactggaaacaagttatcacaattcaggtcctctactgtcagggagaaggaagaaaagaatgccaaggaacctcaggcataatataaatatttcctaccgtgtgtgaaggcagagtgctcttgggcagttccattagaggccagccttgctctgaaagacattcccttcctttctcctacttgttagctgaacctacttggtgtgagaatggctgttttctggtcaaggtcaaagtgtatggagcccctcggtccctgcagttttaagataccatgttctttagttgtcactgtacagtgttatggagttgaacttgattttgtgtcctgtgttgggctaatcgtggacagacagccataggagctagtcctgcgagttgggacttggtgtcattactctaggagctggagctggacctgtcgcccaggctttgggccactcccattctctactctgtatctttgttcttaccgagcctttctacctctcgccactcgcaaggaaaatataactgtgcccatattttaactccacagttgaaggaggacagagcttgttcagcagtgtatagcctcgtcagtgctaaacgtgccttcaataatgtcatcatcaaatgtgactttagacaagtctagtgcagaacccagggggaaagttgcagagatgttcctgaaacctaccatggaaatgaagagcaggaaaggcttggagggcaggaattagggtggagagaccaaaaagggaaggatccagatgatggggatgtgtgtgatatggggagggcggtatttagggttctatttcaaatatagataaggaagaactgtacttatttgtgcacacacactgacgacacatcgttcagagtgaacactgatgtaagttgcagattctgcacgaccctgcatatttttacaattggatcgcaggtaacaagtgtcaaagatgcagggagctggtggcagggaagactatacaagagcatcctagggtaatacggttgcctggaggagacccttgtacctttcattctcttttgctgtgaacctggaactgttctgtaaaaaaaaaaaaaaagtcttctagaaatatatagcacaggattttgtctgaggtttgaggcagggatggaaagacagtgataagcattggttaccaagagggcagcttccatatgttagcttccactttctaaaaggtaactaaaattgcatgatgtgtgtgtgtgtgtgtgtgtgtgtgtgtgtgtgtgtgcgcgcgcgcagtctgtggtggagaatggtggtggcatctcttagtccataggtggctctacagtgtcgcaagtactgactggatttatgagtatgccatagggtagggaagataaatacaaaaataataaagaagataatgggcaagataatgaaatccctgacttaggacttccttatccatgtggacagctggtgtatgtgaaaccatgggtcactgctagttccccatgcaagaaggtgatttcccaggtcagctatcacattctttcagagacagcagctacggttatagagaacactagtagataagcagtcgctgtctcagggaaaggccggaggggaaaggcagatcccatcgctgggaattttgggtagattttgagatacctcttttgttttgtttgccaggaggaggattttgatagatgaggtatttcagagacagatatttcggtggacatcacccggtgccacttccacgtggtctaagaccatttaaaatgcttgccaccattgctcaggaaagtcacacatgcagagtatctgggatcacccctgttatatgacggccacgtacaacaggagattagtaactggaagagacatggaagcttggggctggtctggcctcttctgtgcctgcctctttctggattgtgcagtccctctctgaataatatttttattgtggatgctgagtcaccttcgttaaatatttgactctactaaagtcataactaaggaccaaaataccatgcatagatttttatgaaagtaatggcatgcttcagaaagtacagtcattcagcccgaggcccgctgcatgtggtaaattagtcacataccttttacctgctcccgtgctccctgatggcggctgcttatctgtatttaggtttatcattttgaggaagcaaagataaggaatctttactgtttaaaaatggattttatagtgtaacactctctgcttgaacttcagagagcgagtgagctttcttacaacatctgcttataaacagttagtgctcagtaaaaggccctcccctctccgtctcccagctgctggctacatattacataagatttcatgggttggagagatggctcagcggttaagagcactgactgctcaaatcctgagttcaaatcccagcaaccacatggtggctcacaaccatctgtaatgagatctgatgccctcttctggtgtgtctgaagacagctacggtgtacttatgtataaataaatagatcttaaaaaaaaaaagagttcaaggctaccctcagctacgtagtgaattccagtctagcctgggtattcaacatggcagtaaagacacttggggaaaaaaaaagatttcatatcatcccaagatgcagtgctttgcaacttgggaacacgggtcaaagctcatgggtttattttcatttgacagtgtgggcttattcactttagaaatgatgggtccttcacctgtggcttacggtttttaactttcctctatcatttgtttgtgttgacacttgtgtaaaagtcggggattcccccccccccccaccccatttcgttccttgtggtgctggctatgcaagtgccagatggagctacaaactcaggcaagtgcttatttaaaagaaagaaaggaaggaaggaaggtaggaaggaagggagagacagtttatgtttcaaaggaaaaactacaagtaaagaagacattacccactagctagaggtaatcagtatatggcatatttcctagatactttgctgcatagatatatcattgactttttaaaaaaaaattagctattgtgtgtgcatgagcatgttgtgcagttgtgtgcctattgaggctggtgtgtcgaggtcagaggacagctcaggtttctgctctctactgccatcttgtggggatagggattggactcagctctgagcctcctcttcttgctgagccatctctttagccctgtcattgcctcaaaacaaaacagagcaaaacagtaagatgctgaatagaaaggcaggctcacggctgccccagtttttggttttcagagggccgctgatcttctgatctgggaggggtcatggggtgggcgtgcgaggtttctttttactctctcagtgaagtttccctctccagagcatcatgcgtgcttctttccattagcagagagatggagatgcaaacagagtgtgtccagtagggatggcttatgagtcattggcagaagccctcatcatttcttccaacaatccattggccagaacttaatcatatgatgtctccctaaccacaagggagtctgggaaatgtagtctgtttatgtgtccaggtagaaaaaggaaacagcatattaatgatttgcttggctaccgactcatttttattttgtttgcttgattcttttttgttcttgttgggtctgtatgactgtcctggaactcactatgtagagtggtctggccttaaactcacagagattcacattccactaccgcttgaatgactggattaaggtgtgtgccaccgtgccaggctggaatcagatatgtcattttgaacttaggttttatgagtttgtttggtttagacagtgttaactgtgctgtctccatttccctggagcccttgacttacattccttagcctctgagtactggaattacatggacacaccaccatgcccaactgaatgtactcttgcttgctcggtctcggttacttcggtatccaccctgctggaaaccccaacaggttctctacctccattctgtgtaagccatgattgtcacccaaggtttagcgcttccatcaaaatgattggtgtaatgtcttaccctcttctaaagattcctgtctgctctctgacctcctcacaccacaccacagtgcctttctgggcacgttcttcactggtctgtccatgtgtccccagatttgctgtcagcctcagcctgaagcttcctgctcaccctcaaccttgcttcacaggccttcactcaagtgtcttcccctcagggtgatcttccgttatcactcagcatgcaccgccggccatgattagctgcttctctgacactcatgatgtctctaaggcacttactgccatcagaagcctgagtgtttccagtctgtccttctgcctcttctggattcttgagttctctgagaactctgtcttgtttacatttctgtccccagataataatctggcacatgatgggtattcagtaggtgctcattagatggaggaacagcacaatgtagtgtgtgtgtgtataatgcatattttaaaaatactttattttttgagaattacatacactatagtttgatcatattctttccttttcctaactcctcccagatcctccaccacctccccacccacccaacttaagagaaacaactacacacacacacacacacacacacacactcatacactgttgttgtatctggaagatgctgtttccttggagtcacctttggcattttcagtcactccacctcctctttcacttagatcccagagtcttcgggggaggacatccgataaagacaccctatttaggactgagtgagcaaagtctctcactctctgcacattatctatcttgagactctgtgttaagccccatatgttgcaagaaagttctctgataaaggttgggcaacctgttgatccaagttctggttggaattctgggttcagactccaggcagtcccacatcagatggggcagtggtaggggtgggtgatagtgataggtgagaaggcaggagaaggcaactggttccatatggtccttgtcccagggcccagtggttagtgagccaactccaggaatccctatttcaaggtctggttgtaagtcaaagtacaagcagccattatttcatgtttatatgtaagtgtgtgtgtgtgtgcgcacgcgcgcgtgcgtggagggctgcggtccatgcagggtcttttctttgataatgttgtatcttatctttgagactaggtctctcattgaatgggtttggctaggaacccccggaatccatctcatctccacttcaacatcactgggattgcaggcacttgttgtacccagagtgttttgttttgttttgttttgttttgttttgttgcatatgtgttggatgctagggatcctaactcaggttgtcctgtttgcctgagccatctctccagcccttttatacctattattaatattatgccattatataataatgatatcatgttaatatgatatagcctattacactattatatagctcgttgttgtagaggcttttagattctcctcagaagaaaatgagtcttgacctccaaccctcaggatactttttgtacttatgtgtgacttaaaagatctttcagtgtgtatgtatatatgtgtactgtgcatgtgtgtgtgtgtgtgtgtgtatgcagagaaggcaaggtggtgtatgtgaatttgtgtggaggcagtgttatgtcagggagggaggaaggcagggtgggataggagatggatgaagactcctggggtgcaagtcctctcaagcacgtgtcctagttgtccaaacgtacagcagatctgtggttagttagcagatttgatccaccttgggttttgccctggttttctcctttatcatcacatgatcacacagggatgtatgtgcatgagtgtgtgtgtgtatgtatgtagagaaagcaaggtggtgtatgtgcatttgtgtatgagggggtacatgcatatgtgtgtcaaggtacacatgtggagatgagagaatagcctttgaaagtgactttgaaagtgctgcatccccttgctaggtcttcggagagctcctgggttctgtctccaccttccatcctgcctaggagcactggggttccagactctctgcctgggctccgagggtctgcactcaggtcctcacattttgctggggtgcgttcttgttcttctgctctgctgtgctttctccccatcctcctcctaagattggctttttaaagattgattcacaagtgagattctgtttagcagagcacatgaatgaagttttagaggatttagagatactaatccttttagcaagcttctgctgggctgcgtgcgacttcctgtattacgagggcttatgggaggtgctttcagaagcaggggaaggctggctgcagggcaggttgacctcagaatcttccttgcaacatgagatttcagagcaggtgctcacatttactaagtgaaagacctgatttctttagcaaagtctggctttctctttatttgagtttatctttcagcattcactcatgtcaatgttgcctgggttttttttttttttccttaatttagaaagtaggccacccaggtgagaccattcactcaatgggaatgaaaatactgggaacccaggtgtgaactagccttatcccgcctcttcagacctggtagcagtttggttgaggtccctatcacataatctttgctgggcaggactcaggatgtctgagactttttcgagaggagggtgagcggtttctcaccagcgtgccgaccttcttccctgtggtgttaccattgcgctccatcataaacagtatcccttcatttcctccacatccaccatcacaggtgcaggcagccccagctgggtctgagttgaacgtcagcaacactccaggtttagcaggtatccacttctctacctcagggtcattccacacgtctcctcttgctgcctggtgtccctttagtggcacctgacactagcctgtcacccctttagacaatgcccagccattgtggtgtcctcagattccacccctcccaccttccccacacacacactcttcttgcatgtgtgagcacaagtgtttgagcatatagaagataggtcaggactatctcagcagactcagaggtgctttggtaactgcaagggaggctgtctaaggtgtctaaggtggcatggtgtctttgttatccccgatggctctgcccttactttccctctcctgatcagtccttcggggttgccaaacactgctgttgttttagatgctggagaatgaacacggttcccgcaaagtgccaccgacctgatccccccggcacagatatgaagagaacatcttctttatattcttgtgttttcctctgtatttgtgtggaggcagtgctatgtcagggagggagaaaggcagagtgggataggagatggatgcatgggtggagggaaggctcctgcggtacaagtcatctcaaacatgtgtcctagctgtccaaacgtatagcagatctgtgtttagttagcagatttgatccacctttggttttgccctggttttctccattatcatcatatgatcgtgcaggttttcttccttggcagatgagttttgggttgtgtctctctcattgctcaccactgtgtcccaagggctccattcctagtcattgcttctattttattcttggataactttctggagaccgctgtcaatcacttccagcctcccagtctaggctgatcagctccgacatctctaactcagacccagtgtttctcccattggccatctgatttgtaacctaggtgtattgaacacaattctctatttcagcttatgttattagtgagccaaactcagacttccatgaccttggttcagccctcctcctacgccacctcttccatcctcaggagattctcaacctttggtccttcacctgctacagatgtgctggtgtctgtaacttccagtagactttggtttttatctgaaggccaagttcagtgccagtgcctaggagagacttaaatactagaaggatagaggaaacggatgactgggtgggtggatggaaagctgactaaccagtctgagaaggttacccttcagaatgagacttttgatttctctttatcggaaccagggagttattgtcgcttgctaatactgcatttttgagaaacactttgttttcttagatatttctctacataaaatgtctttctattctattgctggccacatctataaatatacccacttgaatcactttatgcacttggaaaaagaattatttatagtggttttagtacttgatcactggcagatattatctcagtctcccctgtgattatttgtgatcttggtacacctgggcagcatttcctcaaatattagaagtaattgatgttaatgacctggctgcttagaattaaatctcggtttgattaatcaggacgtttcagtttctagagtcttttcccattgtgttgtgtattaaatcttgttcctcaagatgccatctaccttgtttggttggcttgcctgccttcctccctgccttccttcctttcctttcctttctttctagacccagttttccactgggctgtaattcagcaaatcacttcagtagtccaagggatacaccctatctctgccttcccagcactgggattgcaaactcataccatgcccagttttgttatgtgggtcctgggaattgaactcagattctcctgcttgcagggtaaatgcttaactgagtgagctatcctcccagccacccatttggacttttgtttttatacggagtctcattatatatccctaactagcctggagttcactgtgtagccgaaggtggcctcgagaacttcctacctctgcctcctgagcactaggattctatgcatatccacattcctggcttgagccttagcattgtatagctgccgtgttgccctctgaacacggctgtgagcaggagttcctaagcatatatcagtactgacttgaagcatcaggtcgagagaactgtcttcatacagatcagctttaaccttgtcattttccctccccttttccaacagggagaatcccgtatcctcagagtaaaagttgtttctggaattgacctcgccaagaaggacatatttggagccaggtatgtttgcttttttgtgtgtatgggggcttctgggaaacctggtaaactttggtggtagtgggggatattggggactgaccctaaggccttgtgcatgttaagcaaatgttcaacaactgaacacacacacacacacacacacacacacacacacacacacacacacacttatattttcttttgagacagaggctcactaagtttcccttgaccagatttgaacttgtggtcctgttgtctctgccccttgaatgctggaattgtcggcctgagccagaagacctggctggtaaatccttttcaaacttaggggtgcccctggaccacccacaggcttctgcagagccacctgggtggttgctttcgtgcctgatggtgctgcagctggctgagggtggcacttgcatgggtgtctaatcatgatgtctaagtgcatcaccagggtgctcagctgggtccctcattagggctggctgcttgaggaaagtggattcgggtgagggttcttcctcccctccgtttgggaacatggccgtgcttatttttatcacttctgctgcctctgaatccgtgtggagtctcccaatccccaatcagaaatattggggggggggcgaatgatgttggtattgaacatgtacagtggttccccatgcgcacccagccgttgtttcttaacaatacagtacaacaatgacttgcgcagtgtttagttagggtaggtactgtgggagatgtagaagtgattcaaggtatatgggagatatgcactggttatttacaaaaaccacagcacagcattgtatgtaagtgacacagacatctgacctcggggagccacgggaggaagaggaggcagttctccagacatgctgagggatggcctctctggggcttgctttgtgctttcaattcctcactagggggaaataaaagcacgaactatttcttgaacctggtgtggctgacgtgtataatcttcgtccggggatggggtggctgggtgttgctggtggtgttcgttgtctcaccaatggcctggtttgggggccccctggtttgggggccgtctgagcttctgggtgctttagcactcatttcaagtgctgcttgtgatattcccaggcctttttggccaggtaggctctctgtagggcatggcagtatgttatgggaaggaggcaggatgatgataaaacagtgtgaaaggatttgagccagactttgaagcacacagagctcttgagctttgacccagctgagacctagaagtgtccgagcccagcttgctcgattattcttgagatagttcagtagtgtgcgctaaggccaactagtcccttatgtcacagaggccagcagttcaatgactagacagcctactgtcccctgtccaaggcccttttctattttgtggtggaaaggtctcaaaagagggccggtgcctgctgaagattcatgtcatcatgttcttgttggcccccatgctttgccctatggtcctcttattacagcttctctgccggatgcaggagaccatgaataacagggccccttaacatgtcacacctgcctccctccccaaaccctagagaaatcctctactgccagtgcatgtaacatctctgttgtctgactgcccacaccccacacatcactgaactctgcctgttaatgatagtatatgagtttatagaatgagaaattatcaaaaaaaaaaaaacagaagcgaatattggcgtattgtttaaaaagctttcttctgtgtgcttcgaacaactaatggaagacaagctcttagggtggatgggtccctgggaatgggagtgtctgaaagcccagcattttccctgtgctgtgggaatgtgggcgagacacacatcccatgcaaatggtatctctcctttgactgtgaacacacactgtggtgttgagcaccttcctatgctgtgaatcacactgcagggttgaccaccttactatgtatgctcaggcaaagggaggcctgccctggaggtggggacaggaaagccctgcgcttccctctcttcccttccagggcaaccctgtcactgtttccaggaattctcctcctaccaacctgaaatgaccccagttcctggaattctcaaattccatccctatcaaagcttcacctcatatcctgccactatcgcccaactcagctcagatgacctttgaaataattaaaattaaaaaaaaaatcacgagtctaggtgtgtgcatgtggaagtcagcagacagcttctctcgttgcacctttatgtgggtttggagcatcactctcaggctgtcagacttgcacgtgtgttttgtctgcagggacagtctaccgacctttcctttcttagccccttagctttcagcgacaacacagtgtcctttcagtgtctgtccacgggttgtctggagattctcttaatatagcttttgcttgcctctgccactgagttaaataaataaataaataaataaataaataaataaagtcttaaaagacatttttaaaagatgaaatagattatgatcccatttctcagtttgctattaatgtaatggaactgggctcagaatcttataagaacacctataaatttcagttctcagttttcctatttgtatgaaaataaggacctggtgcaaattagatgcaaattagaaagacaaactgtgtagcctgagagatcagtgccagagaaggacctctaggtacctcattagcatggagacctctgtcttgagcctacttgacggtaagatacgtttcttctgcgtgagaagcatagcacttgttctgtctggcaggggggctggaagtcgcctaagcctcaggtgtgtgcccaccaagtctccgggcctcgacctaccttaccttaccttaccaaacttcctggcatgggtttatgtcccactgaagacatttgaacaaagatgtaaacatgaagattaacagaaagacgggtgctgcccaacaggtttccaatgactctgccccacttctgtattttggatgtgatcatagggtggctcctgggtgccttggataggattacagtctgataaggaaaaccatgagtcacaggatagttcagcagggtgaagatatgccttttactgtggggtttccatgagagtctcagacatggtcaggttgttagttcaccaaactgtccttggtcacatgtgctaaggccttaggcactgctgtcctggcattcttctctgaagtatccctctatacaaggagtgttgctatacagatagatggccttggcagcacgtgttgttgctaatgtactgacattcttgattcacctgattctggggtgaagagctcttttccagggtcccctcatttcctccctctttttatggacttgtttgctctcgttggtttgcttggttgatgatgttgtccttctaagccttgtcttattacttgatatttttctggtgaccctcattcactttccgcctgaccttaacacatctttcaaaaccctctgtgtcaccagcaggtctgtgaaacagataacaccaccctgcagccgaaggctggagcccagggagagcccacagtggtcagtcagcggaagctctgaggtagcattaggccgtggtcacgagtacaagagcaggttttgcagtgtgtttcctgccactgtgtgcttcagaaccctgggccagcaagcaatttcccttcacccccagcccatgcctcgctggaactccgtctccctggcaacagtcagggtaggagcttggaactctcactatggaagttccttggccggaggcatgacaggggatactggtgtgggaggccagggagacaaaatgtgagacttggcctgcatggtaatttgggggtacttgtggagaagtagagtacttcctctttgttcttctagcacagtggtggcagctgccgaaggcagctcaaagatcaggcattgggagagctacaccctggtggtctgggtcccctcagcaggaactcaccaatcctctcctgagagacctatgccgagacgctcttctccttttttggttccctgggccacagtccaggacttaggatgcaaagattgtttttcgttcctactgttgccaagtctacgttctattcagaaagaccctttgttcagagcagatcagttatctgagccttggtgcagactactcatatgaagagtggcagtggggacttccctgcccgcctcacctggaggtcaggaaaggacagtcacacagttcttcctctaagattcggacacttctaccttgaagtcaacactgcaaaatgggatgccaaggcgtaagatgcagattgagtctcttgtcaccctaggtggcagacacccagtctttattccctctacaatgacaaagaaaggcagtgattttccccctccctccaaatgtgttgtttgtttgagacagtcttgccatatccagttaaacctgaagctctcaattgtcctgcctctgcctcccatatgctgtgcttacaagcacgcacctccatgcccggctccagaagagtgccaggcaaaagataattgaatcctttatagagtgggatgccagtgagacactgaagcactgttctgccatctgcaggggccggttgaagcctggctgcttttgagcctttttgttccagcttgctgcctgccccagggttgcaactctatcttggcctcaatcagctttggcttgtaccttttaatcttccagtgtgtgtgtgcgcgcgtgtgtgtgtgtgtgtgtgtgtgtgtgcactatgtgtgcaagtgtatatgtatgtgcacatgtatgtgtgtgtgcacttgtgtgtgttcatacacctgtgtaatgtctaccttgattatatgtgtgtgtacacttgtgtgtgtgtgcacttgtgtgtgtgtgtgtgtgtgcatgtctgtgtatgtatgtgtgtgtgcacttgtgtaatatccactttggttttttgattatttagatttttttttcagtttgtttgttttttaaagacaaggcattccattggcccggacctcactgattagggtactccatatttggccatcagaccccagggatctaactgtgtctgcttccccaagcgttccatcacacttgctttttaaacatggcttctgggacttgaactcaaaccctcgtgcttgcgtgacaagccctttactgacttgagctttctccacagccccttggctggcagctctgctagtttggtttctgatggctaggattgtattctggtcttcaccttctagagtctcctatagcccccactgtccctaagagacaacctagagtctgcacgaatggggcccacttcacctctcccttctcttcatcattgctgcttctactctgtcattgagaactcaccacactctaaacaagttgctgttgcttgttgtggctgctgcttttagttgtgctgggagtctgtttgcattctttgtggtagcttctcacttgactgccccctcccccattggcctgttccagtggcagaatacacgtacaggtcccttccctgtgatgtgccctatagtccaaaggttggagcaactgttgtccctggtctacagtgagtcgctgagtctctgtcttcctccagctcttaccttacaaagctggtatgtttagaggccagtcttgcttcttcatcactgtggtaggcccaggaatcctgtatgtgattggggtcagtacactgacttgaactccttaaatgcagtgggattggagtgttccaatagggctgccagcctagagagtggatattttcttcttcctgcagatgctgtggactccttaccctcgctcctctcttgggcatccaggggaagtccttgttctgattctctcaggagctctggagacacagcagagggagctcaccagaagccacgtgcctgatgagtgtgtagataggtaggcaggcacaggatggcagataaagaaatgttggacaaaggggatttggtgctgacatctgttaaaaggtacagttttgtatcttgcagagggatgaattcacccatactatagtagatcccagaagtttctctggataaataaggccaagccaggattgggaatggagggtcagggcctttgtaccaaccccttagcattaggagtcaggaaagacccaaggacgtgggagatggatggaggaacacacaggtgctgtgggtcaccttggccgccatcccactgaaatgcaggtagtgggtcaggcatcgtttgagagccaaggcagaagttgaagctgcatccttgtggatactttctgatgggacaggcacaggtcctgctttttgaccacagtgacatgcgcagtcaggatagtacgaggcatgaagcaggagggcagcgagtcacggtatctcctgcttattggacaaacaacacatgaggaccacccccatacagatgggggacacaccagcatgctagtgttcttgtgctagttagaggcctttactatggtaccttcctgggttggcggaggggtcctgtgttatctttgggaccctgaggtgaaattgaagctccggctcatagctgagctcagtacctaggcctcagtttaagtcttggtgtacagccagcacagtgcaggccaaagacctgtggatatggatacctgtgcaaggccaaagtacataggtacctgtttaaggtattcatatcctgtgttcttcctggcaacccagctttcagctgacacctttgggatgcttagacttacaagagtcctggttaggtgttaggatttgtgacctgagtcaccttggcctcatgttctttggttcctcattgggctgcttgacagagagtgcaggctgtagaaccgggagtctctcctgttagagatttgtatctgcggtagaggtttacctatgtgtgatggggtgctatacacttcgccatgcacacactagccagcgctgcttatgtgaccaggactgatggtcggaactgtctacacacagtaggtatctttgtttttctgctttgccgatgaagaaatggaggcgagcaagagtcagcaaatcacgatgtgtggaatgctgctcttgagggctgagagttcaggcgctacctgggttgtcagagcaggtggccagcagaggtcttccacattttcattccataccttgttagcagattcaacctactgcccgttgtagcccatggtagcttataggtgctttttgagttgggactgttaggttgagaatagatgtgctttgctggtaggatctggaagttttccttttaaacttggaatacctgctcttcttcagctacacttgagtgtccagacttttgaccttttatcttagatgtaaacaaccaagtaagactacattttaatagctgccaacttttcctccttgaggtcttctcggtgtgaactttcagaagaggaaacagagccactctttaaaatagaaactcgctctgggatttcatgttcccttactgaaagtgatgtttcacggtttcacagagtgtgtggtgagctctactatgcccttccaagactgggacactgtcatttgtgcggtgagcccctagtactgacctgtacacgattgggccactgtcatgtgtggtgagtccttagtattgacctgtacatgattgggtcactgtcattcgtggggtgagcccttagtggggtgagcccttagtactgacttgaatgtgattgttcttctggcagcttctagtttgaattttgaaacaaatgggctgaagggctctggaggtataatatgtagagaaagccctctgtcctctggctaagaatcctaatactgtaatgccatgtaataagggctcacatccctatggcactagctcattttggtctcctttatctagatctaagttaatattttcctgtgtttgtttcatcagttttccccccaagagtattcaaaatcaaattacaggtaacatggttttagtccctaagtacttcagcccacgtctccaaaaatcaacaaataatgtctgtgtatagccacagaactgtctttacaaaattaaaaggaattgcttaatgggcactgttaccttgtccatgaagtgaactcccctaagtgtctctaaaatgccttttccagctaggctgttgggagtggactcagatgctcatgttgcatctaatcggtcaggtctgttggactctggtctagactaggtcctcccctcttagctttgagtgactggtaggtatcctgtctcattgagcatattacattgtttcctggtgatgtcatcaattaatgaattaatgtgttcccatcatggagggaagctatggctggaactgaaggcaagagcttggggcagaagccttatacgaacactgctatggcttgcttgctctggtttgctgagctatcttttttttttttaagatttatttattcatttaatgtatatgagtacactgtagctgtcctcagacgcaccagaagagggcatcggatcccattacagatgattgtgagctaccatgtggttgctgggaattgaactcaggacctctggaagagcagtcagtgctcttaaccgctgagccatctctccagccctcagctatctttcttaaacagtcagggcccacttatctagggatggcactgtccacagggagctaggctcttgtccatcaattagcaattaagaaaataccttactgataaggctacaggccagtgtgttatctaggagattcctcagttgtggtatcttcttcctgactggttgtgggaagttgacagctgaagctgaccatggcagggtccttattctcatgtgtttcctgtatattagatgtgacatttagacaccggaacgggagacacatcacagcatcttgtcatgccgttatcagcggcgctgaggtagttcttgggtttttgtggggacggtttgctcccaataatatcaaatattttccctctaaaatggcaaaaagtaaataaccagtaagttgatgtgttggctacatcttaaaatattaatatagactcaaaatatgaatttgcttttacatattattatttatacgagcacactgtcttcattggtggtttctttttttgcccctttgaaaatatcacataaaacaacccccccgtcctttgatttctgctctaagtaccttgaagtcccccttgatcaatagaatagcgtttcaggctacagtgtggggactgttgatccccatggactagaagaaatccacagtgtgtcgattttgcttgtggtgtactgagaaaattctgagctaacgtttggaagattctgtattaaaaacccagactcctaagagatcttggtgatctagaaatgccaggctgtcgtccatgtaaggattcatgactggaggtcagtggtgggtttctcttctaggtagaactgaggcccttgggtcccagggaactcagaagcttgtattacacgcacctggctttcctcagtgaagagctgggcctgcttttggtgtttctcctggacattgtttcttgaatagcgggagctggattgtcttactgtcttgtcacagagcactgacactctccagagcctaggtttagggcctgtagactctttgccagcctccttttccctctgagggcccgttggagtagctttgctgtccagggcattgctgagacccacaacatctgcaaaggtaataatagcctttgaaccaagatgtgtttgtcttaaaacctccgcaccaagtagcccgttgctgctgttattcgtatggaaccctaaagaacctgttcttgttccccaccgtatcccagaaaaatgccaaaataacctgaaagaatattaaccttcttcctcagctataaataccacccatcgtttatcctgaaacacccacattattgtttatactttgtgcttttcctggtctctatgtgaaccagtacagtgtcctttaaaagtaatttcttatagcttgtataccacctgcccacttggtccctggaggtgaaggagcatagcaagttgatgaatgcccagggtagcccgtaactaggttgtcagaccccgaggcttgctgttccctatcagggccattagcatagatctttctagagatcttgcatcctggaggaaaagctgtggtatgtctgatattcattcttacagggcagggtgtatgtctgaacatttaaaaaaaatatatttctttttaagttgtgggttttttgttttgtttttgtgtttttggttttgggggatcttccctaatgttgtttattagtaaatgtcacttcctcagaagtgtggtcccctgctttctctgcccctccccccgatttatgaatatattaagattaaagaaaagcaaaaataataagactcctctttacttccttatttctaaacctcaatgatgtagcagtcactgagaatctgatatagttccaggaataggacatgctctgcacgtcgtaggtgcttgataggttttgttgatatggctaaagccaaaagcagctgaagtgaatggttcagacttgatcatgacaggcagcaagggcagagtgatggtagccctagtatacaggaggtgaatccgagtgtggcactttcttgggtatgagatgacctttctattcttctctccaggtatgctcccctctttttcctcctggtttccttgctaggtttctggcctctgtgagcgcagacataaggagctcagaggggtgccaacttgagatgtaaatctgaagcaaacatttctcagaaaagccatgccatacttactttgtagaaactgaactactgttcacaccttcaggggctctggctgagagggttcagccagagcagttctatgatgggatggtcaaaggggtccgtcgtcgtcccccccccccttgtccatacccaaggaggcaggaaggatgcaccctctgcctgtgactggtttccacagccctgactgctttataccataaccagagtgcagcccaagaggccttgggatggctgtcctctggatttgccatgcattcgcacgattgaaagttaaatgtcctattggaaacctggcaatggaattctcaaatgtgtgtgtatggtgtttgcatgtgtatgggttcacatgtatgcgtgtgtatgcatgcacatgtgaaagcttgaagttgctgctgggttccttcctctttttaaaaaactattatttatatttttatattattatttatacaagcacactgtcttcagacacaccagaagagggcatcagatcccattacagataattgtaagctaccatttggttgttaggaattgaactcaggacctctggaagagcagtcagtgctcttaactgctgagctatcttgccagcccaaaggattccgtcctctttattagtcttttctttttgtcatgtccttataaaacttttttatatttatatcttgaggaacaaaatggttgaaaacaaccatttttaaaactataagccttaagccaaagaataggttcttaaatggaaaataaaacctttcctgggggctataggtagttatctaagtcagaaaccactgtgtgtgtgtgtgtgtgtgtgtgtgtgtgtgtgtgtgtgtgttcatctgtgtgcttgtttctgttttccagtaaagagccagatagattgttaagctttagccggacttagtctcttggcaacaacataaaacatttggacagtagtatagcctttacccctaatgatttgaatgaaatttgtgttgttgagatgataatggagtaacaaaggcacccacattttctttgatccccaagatttacaactgaaatgttagttttatgaagccaggatagcacataggggtggctggacagacagggtctgagtccatagaaacagactcaccaggactctccctagccctcagttttaccaagtcttcttcctaagtcaagggaaagacccctctaggcccagggtctttatttctttatggccagttgttacacagacaagcagtgtagaatattagagaaatactgttctgttttatgactggctttgaagaagaaaggttctagtttctatgatctgtcttgaagaataggaaagcttgtttctttctagcttgcttcatggggaaatgtgggttgagagcaggagagtaagaaagtcactgaaaaccttgcttctgagtctttgatttgggtttattgtttatggagtctcaactaaatacaggggcatagcgatatgccagtggtctgcaggccgtggtttgaatgtgtgggataggctactgattttcctctagcacttatatttagaactaggaatggggtgtcaatagtacttggttgtggttttcaaattaaactctttgatggaggttctgggtggcaaatgacagagtaattttgctagagcttggagcagtcagattcctagatattgcagcagcttttatttatttttcttttcaggggcagcaagcttaaatatagttcgtgaaagcttttgatgcacactacagatttaagacagataatggatacagctacaaaatggtttttgtcttagtggaaataattattctcattgcttcgtacataagatacatgaatagtggctgaagttgaattcatgtttgtgcaagcagatgcagatgtatagccgactgcctgtcttccttcctaaatattttggagacgtatgaccccgattcaaatcatgtttaataaggaatctacaatctgttaactgcctagtaaattactaaagggctggcatgcaggacatcagcacagttaataaatacatgtttgactctagtgagtggtcctgtgtgcttcagagagaaaagggtggtgaggttacctccagggctgttgacgtttctgtccctccgtgttctcagcccattgttgggcttcccctattgtacaatgattgtcttacatcattgtcatcgtaaatgcttaaagttagtcattcgtggtaaaaaaagtacagacaattgaaagaaagacttccaaattttagtggttgaaccagaaagcaaaacggcaagtcaatcttagcacctttgtctcctttttctcagttagaaagcagtattgttggttgccaagacacccccctccttctcttgcaataatttgaaagtttcttgaaaacaaagacttagttatttgtgtgtgggtgtgcatgcacacacatgatgcgtaaactcttagtttcagaggaccagcatccagtatcccttcaaagcaaggtgtttctttagttgtcctggcatcttttcatctcagctgagtctccagtcacagccaaccagaacaacagagaagtcacagaaaaggccagtggagtgtttgcttccctctgaaaagtcacaagtccatcattcacactgctcccaacatcctcttcctccaagctcctacagaacagccctcgacactcagtggcttttatagcccagagttccagagtccttcaccatcctcccccaaaaaacacagtcaggtactcacgtctggtaccaacttgtcttagagtttctattgctgtgacaaaacaccttggggaggaaagggtttatttggcttacacatccacagcactgttcatcattgaaggaagtcaggaatagagaaggatactggagtcaggagctgatgcagcggtcatggtggagcggtaggagcgctgcttattggtttacttctcttggcttgctcagcctgttttcctatagaactcaggaccagcagccagagatggaacaacttgcaatgggccaagccccttctcatcaatcactaagaaaatgcctcaatgctggatcttatggagacctcttctcattgagatttgctccttacaaatacctctagttttgtgtcaggttgacataagagtagccagtcagcacagtgtggaaaacacctttacccatggagctacctcatcagctcacttgaagtgattttgtataccaacttctgtattagtcagggttctctagagtcacagaacttatggatagtctctagatagtgaaggaatttattgatgacttacagtcggcagcccaattcccaacaattgttcagtcgtagctgtgaatggaagtccaaggatctagcagttactcagtctcacgcagcaagcaggcgaaggagcaagtagtataatcctgacaatatagaaagtacacatttcttgcttctggagcaggctccaaatagtatataacttcatgttctcttgttattcaatgtgtagatagaaccatttcgttctaaaagtgagatttcctgctaactacgatacataatttggattgtctttgtatagtttcttggcctagaatgtcaattttttttttatatacctttcattttatggaatgatccatcagtcaggtgctgggaacagttgtcctcagtccactactgcctcttgtcttcatgtctggtccttagcgtttgaagagggagctttatccactagtgtccatcttagtttgggttactgagctgtgatgaaatagcatgaccaaggtaacttagaaaacatttaatgggggggctggattacagttgctgagggcaaacccatgaccatcatggtggaaagtgttggggcaggcagataggcatggtgctggagcaatagtttaacagcttacagctgatccacaagcataaggcacgagaggggaggggggcgagactgagtcagatgtaggcttttgaaacttcaaagcctctcctccatgacacagctcctccaacaaggccacgcctcctaatgcttcccaaaatatatccaccacctagggaccaaacattctaatacttaaacctacgcaggccattctcattcaaaccaccagcaggtccatgcttgccctcttcttctgttcttccactgagcaatggccgtgttctgtccttggcagtcattctgtgaggcctgtggtgacacagacacaagcacatgttatgaggacttctggtatattctttgcacctcacccttagcttctccaagcacctatggtcaaacctttgtgtcctcagaagagctactgtttctctgtcactgtggctgcatcgtccctagcttctccatctcaatgaccaagttgttctcttcctgtttcgttccgtccataccccaggtctctgcatccaccctttcacacagacaggccatgacatcggttccctccccagcagtggcagtgagcaactgaggtgagattttcactctcctggccttcgcattcatgtgaataggagatggatcttctatttgctgctgtcctatatttttacccaggacaccatgcccatgaaaacagtcatccatttatttgccggatgagttattattctcattgccctggcaaaatgcctgacagaagtacttgcgagaagaaaggcgtcatagtttcagaaagtctatggccagggcagtaagggaacaattcccaacaatagacatgaacaacttgagttccttacatcttagcattagacagaaagcagagcacttgggccagggtcggccagaagcaacccaagtcggctagctaggccaggagtcttaaaggttttgcatcctcccaaaacagcaccaccatctggaaatcaagtattcaaacgcagaagggggacggcatttcagattcaaaccacagctccacatatctgctgcttgcattgggcaaactagaggtccttaagcagcttgtccctcttggctcttgccactgggctgtctttcctgttatgttttctccaagctatcttgcacgctcatattattactatctgaatgtattaaccttcttgttccttttgttattctttgcgtatctttttaatacccctcattctataaaataaatacattatagattttaataatataaaactttctgtaagtgcacattactttttttttttagctcttcctcaactttacgattagcacagatgcatttattttgaagtaaagccccattttaacctccattcccccctcccttcaaattcttagaggtaagaattgtgatgcatcctggcctggacgtgtcctgagtggcactgccctcctgctgtgttcaggtgtattgtggaccctacagctccctctggtggccagttgctaggtgcattttcattctggactgtggaaatgggctatgaatctcatactcactctttggagttctctggtaaagattattaattcatatctgggtagtttgggcacacattttcattttcagtcagttctacacataggaaagagttatttttactttaagcaatttctattttttacatagttggtgtttttaaagtaggtagacatagcattaaacattattatcttcttttatctgccaaataatttgtaggctcataaaaataagataccactcatacaaaaaggaataattagcagatagtgaaaagaaatgaaattcttcaattgactgctatattccagtgtggtcttgtagactctgtgtgttgctgtgtgctagtttcaaagtttatggatcagaaatttaaaaaaaaaaaaagttgctcaggtttccatgaaaaagggaattccagactgatattcttaacacagaaatgtatcttactatagtttcatttatattgctataaatagttgcctcggccatgcagggagctgggtgggtcatctcaggattgttccaatgcagtttggatttaaaaaaccagattgtccctgagctccttcaagactgcacagaagctatttttagaaaggcagaagagctcagcacttgggaggcagaggcaggcggatttctgagttcgcggccagcctggtctacaaagtgagtgccaggacagccagggctatacagaggaaaccctgtctcgaaaaaccaaaaaaaaaaaaaaaaaaaaaaagagagaggcagaagaggctctgaaggtgcctagttctcctctgtctttatctcctctctgtggctcacttcaaaataggaggttccatgtgttgattctcatagtgaccctcagagaacagcagcagcggcagcagacttaaatgaccagttcttacatgcaagttgtgttggttatttctttggtatgttcaagtattatttctgtgtcttgatagggtcctactggggtcaggggagagagattcagtgagtcttgggcactctgtccaaatggctgtgtttcagcaaaggccctaaaccaggcagctgtgtctagaacacccattcatttttcactaatatacttaccctttgccatcatttaaagtctctcctctcctctcctctcctctnnnnnnnnnnnnnnnnnnnnnnnnnnnnnnnnnnnnnnnnnnnnnnnnnnnnnnnnnnnnnnnnnnnnnccaggacctcactttgtagaccaggctgtcctcaagagatttgtctacctctgctgggattaaaggtgtatagcaccactaccaccaccatcaccatttaaagtcttaaacaccgacataaacagctgagaggcaggccggacatgtttgcagtgggacagaaagtagggaagaacacaagctatttgggatgatgggaaagtagcttttgtaggcattaacatttaaatttggctctgcggttatagttcttaccaccttcccagtgatctaggaatgaatacattcttaacatgcctgtttttaatcagaagacagttcattcatatacgataatgttttcacttcagacagcaccccccacccccggctgctaacgcagtataaatacaaacattttcttgcccttgagaaaattcaggcctctcgagtgaacacagaaataaatggaaatgctcaagtgatctcagctaagctgaaccaagctaatcagtggcatggtgtttcctgacgcctccgctaggccacaagaaatgtgctggtgtcacctggctgtgaagcggaggtcaggtgtctagagagtgtggcacacctttctcactggaggccattcatccctgtggtccacagcatcagcctccagcatgtctcctctacctgcttcctgctagatttatccttctgggtatccatgtctttaccagcggagccagctaaatagagccttgaaaacagcaagtgggtggctggtaatgtggatgtccttggtttagctgcaaatactgtaggcaagactgaacttgggcgggcgtcgtaagaactagagacacctttgcaagaatccatggacgaaaggcatctgctccttctattcttcagaaaagagtgtttgttagcatctcctacgtcgttttttcaacacagacatgaaatggatggtcttcttcatgttacacttaacctatggcttatgatattgaaagtgatgcatgctgggaatatctcagtaagtacacatgcatgaggcaggaaataggcttttttttttttttttggccgtttctctcagtctcacagaggtaagccatttctgtggctttgatgttttccctctaaaattcaaataccaataatgttccgagattcatagagcaggctagataaaggtgactaaacctggggatttccccaggggagaactctaaagctttctggagggtgctttcttttacaaggtgacagaatacttaaagcaggaggttgcaaccctgtgcagaccgtgtttatagttgctctggccttggccttgttgcctctataactgtgggaaataaatgtctatcttgatgaattaaccagctgccagtgttattttaaggaagcatccaatagaccaaggcaccggtagccagcctcctgagaagtgtaacgccttgcttgctttacttgtttgttttgatgagtttcggcattgattcagagccctagcctatagcgcaggctggtggcgatgatggagagctgaccatcctggagctttagccggtctggatctcccagcagcactctccctacctccggctcccaagtcctggcattacaggtgtgagctacacgttcttgcctattttcattccaggattcgcagctgagctatttccaggtctcagcacacagctgtctgtcttagcattttcgtaaccattcagcagccaccatattggagggccgttcattgtcacattgaggtcacttgtggtagaagaaatgattccatggacctcgctgttgcttcagttagacacttttcaactgtgcctttttttaaaaagaaagacatttttcacccccggtatcacgttctgtgcaccatggattggaatgagaccccaggcaagatctgagcctgctcagaacacagctttcatctctgaagtcattggcttaacttcaaggggaactactttgaaagaccatcccatctcttccctctggatcaacttcctactgtcaacctgggttgcctagagaaacctgtctcccataggaaagatgctcccagtagaagggtacttagacgatgccagctggccctcgtgccagtggttgccctgaggatggcatttaaattggcatttacagcacttttaaaggtaggagttagcaagctgtgtatcatcctttggtgtgcatctggctggtggaagcataggttgttgtgctcagcatagcgacggagcactctgggtatcctgcatgcctggttagatgttccctttagagccctgtcctgccctggggggtgctcttacagtttattctttcttacacctgtgggcatcttttcagattgcttctccacacttgattcactctggctttaatttgcttcactatagctttgtaaaagcaaaaactttttaaaaagaaaaagatttatttatttaatgtatatgagtacactgtagctgtcttcagacacaccagaagagggcgttagatctcattacagatggttgtgagtcaccacgtggttgctgggatttgaacttgggacctcttcatactgagactgtgctggagttacacatcggaccgatgatgtttaagtctgactccacagtaggactcacagagaccgtcaaaaaaatatttcactggggtctcatccccgaaactgacaaacagcttagagtaagatacaggtagttggggtcaggagccacagtgaactcatttctgcagttgggaaaactggggcttggaaaagacacttgttaccccagggctctgaagttatagaagcagatgggtcagacttgcacccctgactctggcatggcctacatttgcataacactactactgctctcaagtcctgccttacccggatcgctctttaccttttccacgacacagtgttggtgtgtcctaccacctgcaccaacttagtggcctccactgccatttgaagaatggatattatgcaaatgttcatttctgctgtcttacagaagagagtctctttgtacgagcaatctgtatttgttagtagacagatccaggtctttctatcggagaacctggcatgccttgattttttttccagtctgctgtgttgggacagaagcacggggtcactttttggctcctactcagtactgttctcttgaatcagaaaccaagccatgaccttctctctcgcagtgccctttgtccagcaggaggactggggacaaaagatgtgtcttcaccttcccagggcttctctctgggtttccaatcctcccagacaacctgggaagcctttatcttcctctgctatgcagtgagcagctcagctaacacctcctgagaatccttcaaatcgttccccaaagaaaccactctgctgcagatgcctatatttagacctcataaagcccacatcagatttctgctgcctttctctcaccgctctaagcctgctgtttgaaaggcagcaggctcttttgtctttaaagttcagcactggctggctggctcccaccttgaactctaccgccttggaatgtcctaggacttcttcttccctcattctgaccaaactccaaaccacgggtaataaataacctttacaccatagaagtagaaacaatacaacagggctagaaaatatcttcccaacagggccacagctaagtgaacaagagtgtatttccacatgcctcaaggttcaattcatcccagatgcatttcactggttcactagactcctgtggcctgacggctctctaggtgtctgtccgagatcagagcatagttgatggttagtagcataagatgctatcaagttgaaactatcaagttcagtatcaaactgcatagaacaggattaaggtgttgacttggagcctggtttgggctttcgggtacatgcctttaattttaggaatgagtttgaggccatcctggcttatagcaagttctgagacagccattgatacatagaccctgtctcaaaaataaaaaaaaaagaattttttttttttaaacaggggtatcattgggattgattctcaggtctcccaattcctagctgatcaggttaattatttgacgggttatcacttacttcagtggtattcactggctggctttcactcacttgtctgtgtctccatggcatttctgctttctacctaaggagaaatttctttcattgtcactttctgttccattagttagtggtgatgccacccagagggacttgtctctgtcttctagttagtttagtagtcccagattcatgccgactgaaactttgtcacattctgtagcatagatgaagagaacaggtgtgtgccttcagaagttaattggctcttgctgagtcgcactcagcccatgaacatagatcctagatatccaagtggtttttgctgttgtcttttaaggagtttgacatgtacaggttcatatgcatatccaacattttattagggcacaatattgtcatcggtaaagttcacactcttctagagcctctacagaattccttcgagggaaccaagccatagagccattcccccacccccaatcttacaatgtttcagataagtttatgatcttgctttaggctgtatacattgctacccacggctcatggcactgtattcttgcggttggcttcacgtctggttgttttaaacaactgattggtgcatgctgtcatccttcggtataacactgcagcctgtgtcgtggccttggccttgcagatgaacctgtggttggttgcaagtttttgaaagcattagaggctaagaggaaagcaaggctatgaatatacacacttaggagggggcaggtgtctgtggtctttccgtgctcctcattctgtggtaccttgttatatagcctagcctgatgctctcagtttacctgcctcaagctgtcaacatattagcatctcatcctcttacgtgggcatcaccatacctggctgagctgtatttcatttttcttcttcattcatcctttttcagtcttttatttttataattttaagtatgtcccatatttacacacacacacacacacacacacacacacatatatatatatatatatatttacaaatacatttgcagatacttcctccagtctctcttgggtcccccatggctcctcttaaactcatcgtttcatcttctttagttattattcttacactaagatagacatatgcatataataacttggaaggatcaagctagatctgcctcctcttgaagactagccttcacagtactgaagggtgctctccaagatgccaagagagaaagtgaccgggagtcctacccagcagtgataacctatgaaccacaacagtagccagaatggtaagctatcccagagtgcaacaggagctcttacatgctggcgctgaccagcagctgcctaataggatggaattcatgctgtaaacctagccagctggcgggcacctacttcacctcccaaaccagtatgaccttgagctacattcgtaatacttactcttaacaggtgtggctctcacccctcgtcagagaaggctttttctgaagagatggagaccattgttgaaacgggcctactgatcaaagcccttttacaaatgagctatttcttggcattactttttctctttgtttttttgtttttgttttttcaaaacagggtttctctgtatagtcctggctgtcctggaactcactttgtagaccaggctggcctcgacctcagaaatccgcctgcctctgcctcccgagtgctgggtttaaaggcgtgcgccaccacgcccggcttactttttctgtatgctctgattggaatgcagagctactgaaattcacctcttgattgttctgggataaaattaagcttattataaataagatttctgctgtatttgcacttacatgcaaccagcacactgtggtgatgaggttacaaaacagatgttttcctcagtgtgaagtcctgacaatccccgccttcctcactgcactcagtagcatccttgtctgttacactccagaccccggatgcctccccccacctcaggtcccttgtatcactgctagtctcctggcagctgcttatgaaacctaacgtttattggactctcccctgctgctttcttataaattacagcatcgagtaagagacttgacacagcggcatctcttaaacatgagttttctaaggtcatctttcctcacagtcctcacttctggtaattactccccccaccccccaagattggtgtcttagttcaggttttactgctgtgagcagacaccatgaccgtgtcaactcttataaggacacaacattcaataggggctggcttacaggttcggaggttcagtccattatcatcaaggtaggagcacggcaatgtccaggcaggaatggtgcaggagaggctgagagtgctacatctttatctgaaggctgctagtggaagactggcttccaggcagctagggtgagggtcttaaagcccactcccacaatgacacacctgctccaacaaggccacatctccaaatagtgccactccctgggccaagcatatacagactgtaacaattggtattggatgtagaatagtctagaggcctgaatggacacccaggagaagagacatggttaggaacgttgctttaaatgtgactgactgccagtacattctccagttgcacaaaacaacttgtagggaccttgagacacacacactaggtcccagtcctgaggtgttcctttctctggttgtttcagaatcctcggctgcctttttcagtgtatagtgtgcttggtaattctcttttcctctcagcaatgttgtgcctctttctgttctatgtgtggggcacgctggcgctcacttctattttctccctgcgtgctgagaattttcgttttataaccacactcccagatgttaggcggggaaggagaaacataatttttttaaatatatgggaaaataatgaaggttgaaaataagatctgaagggagagcgtgaaggttgtccttgagcagtggagctcagggagtatttgtgacaaagcaggaaatccatggctgcctctctagagtggattgaaggtggagcagggttcatgactgcagtatccaaggaccaccagcagatggggatggtgatctcttggcccaggtaggatcaagcatcctctttaactcctcctcattatcatcactgaagagtggtaccatttgccaggctgatcccaagcctcttaaagggaagcaagcaggcaaagacttctggctctgctgtcgacatctctctatattcttgatccttaaatggagcacattcctggctgtcttagttcgggttttactcctgtgaacagataccatgactaaggcaactcataaggacagcatttaattgggtctggcttacaggttcagagggttcagtccattatcatgaaagcggaaccatggcaacatccaggcaggcatggtgcaggagaattctatgtcttcatctgaaggctgctagcagaatactggcttctaggcagctaggatgagggtcttaaagctcatgtccacagtgacacacctactccaacaaggccatacctccatatagtgccactccctgggccaagcatactcaaaccatgacactggcattcaagtgggaatttacattgagccttgggccgtggcacccctctatcttgggctgtcactgggtatcctagacaaggttgagtctgaggggtcatgggctttctctttttgaccattggattcaaaactgaatttcaaaaccagtgcctccaacatgttggagacattggtgaaaagaaaaaacatcctatgttaattaatgtgcactggggtatggattcgtttagtgagcagtgctgaggaggaagccagggtcttgtacctgctaggcatgagctcaggcagtccacactatgcctcttgagtctgtctcctcattgagggaggcagaaaaaaagtaacgggggctggttgaaggctgtagttcagtgctaaagggtaaggaagggctaaaagcagccttgacggtggaatgttgttctcaagaacaccagggcttccctgctctgtgtaggacaggaaggaggtctcggggcttcccttgccaaggatcagggtggtttagaatatgctctgtgtcactaagctaaaagccagccagttttagtgaataaaaataaaagttcctttggtctttatggggatgacaagaaatgtcccgagggggcattcttgctcccttagctattctttctaacattttttgtagccatttaggaaccagtcgggaggactgtccttccttgctcccagatactgtgtcactcattgtaaaggggggcattccaaatagctgagagactcagaggttccaggtcacctgcggcagactgtacgtgagtcttaaaacttggctgttaacttccaaggtgcagtttggctgcagggcagcattacagagcttgagttgttccctaggtctctggaatccaccaagttccgcctatagtgtttggccaggctgcctctgggatgagctgtttctgtcttccccacgtttgaattcgctcacgctttgagacaggcaggcatcagcaacagcagtttttagcccagacagctctcagcaccgtcagctcagcacagcttcagagggctctgcctggtgggaagctctgcagggctctacctgggcagtagctacagagccctcccctctcagcaccttgctccgcccactcgttccaggctgtcgattgccggtagggaaactggagagaccaggattcctcttccattcttgctgttgttaaggaaaacagaccaaccatctgcatctagaccagccttcctctccctcgctcccttttagaggaggttttcctgcctggaatctggtaagtgtgggcaaaggctctgtctcctttcttggtctgtgcagaacggtctcgtgttgtggatctgtgagctttaacctacatgtgctagaatttagaggagtctttgagcttacaccttctctcgcttatagtgctccttgaatatttttagcatgccttgatacctgtatcaaaaatatagcatattttttccattactgatgtgcttaaacctgtgtcatcttgcctgaagcttcttctcactgtacagcgcaaaaaatgattatggagatagttctctggtgccttccccatgaataaatgatgcatttgtcattgctgttttcctgaaatgtcaaaaatagacacagtgaaaggatctgtcacacagagttcagaaatttggtacaaaattctaggttgaaataaggacagatcttttcttttttaggcttcattatgtatttgttccgatttcaagcatagccagtgtggtcacctgggctgccacgggatacatatgttcctggatccctggagacttacttcctaggactcgatttgtcatagaccttcctaggaaactcgaggggacaagtcctatggctcccaactttagctttcacagagcttcacagatttttatcatttggctcttgtgtggagagaggcgtcctgtcaggaagtttttatactgagaagtgaggtgccctgcgactcagtcctttctcactagcgtctcatggttctcaatctgcagaagaggaactgttatcctctttcagagagcgtgtgatggacattttatatcttccatattctaagttacagaggacttacataaatgccatttaggaaaatacaggaattaatttcttggagtaagctgtctttccatgcgatcatttgcaatagcctgaacagtataggcagagagagagagagagacagacagacagagagagagagagagacagagagacagagagaaacagagagagagacagagacagagactgagacagagagagagagacagagactgagacagagagacagagagagagacagagactgagacagagagacagagagagagttaaaaacatattatatttcaaatatatgatttgaggaaaatggaattatataaccctgactggaagcccagggcaaggattcatttgggggacatacccatcaacgggacccttacaaaaaggctgagacggagcacgtgtggtctcatgggttagaaaaggaggaagttaaccttgggatagctttaaacacgccagaaaacaaaacatttgtcaggaatcttcaaaaccatgggcctttgtaatgtgtgaaattgaacttctgacccttcttacttcacggtgacttgttttccttgcaaattatgtggtgttgggcattttgatgtggggcaaacagaacggttgaattactatagggacgcactgttcttttggtaggtgacatgagattgtagagctgaaaccaccactaccaccaccaccaccaccaccaccaccacccatacacacacacacacacacacacacacacacacacacacaaagacatttgaaaattggtgagataaaaaccctagcactcctcatctgtgtataattccctccccgtcggctgctctgcacctgtggtaatgtttgtgcccccccaaaatggagcgggaagagcaaatagactctggcaacctcagaagaaatcagtgtcctattccccgagccaggggtaggggtgacctcatttcttctcctgcttggacactgatgtactcttcctggtgattcaaactgtgtgtttggtaacattgtttcaacttccagactctcgcttcttgccaagaggctccagcacctggttaatgatctctagggtaaatgactcgaacctggttgggactgctcaagtggaattgcataccctcctctggggacttcttccctgccagccgcctgcccacctgtgggaactgggcagagccagtcttctgtgctcgttcctgggtggtacaggcgaggtcgaactacaaatgccagagaagacagcagctacaagctgccctccagaggacccacaggtagctccaggaggagcggggtagtcctgagggccacaggctcccccagaggcggcagggtggtggcagatgatagtggtattaaatgattgtatgtccccatctgcatgtggtaactgcccaggtctcctgcaggcaccgtggctgccatctgttcttgttcatctttgattgacagtctcagtaaatggcagggctgtctcgatagcctttgtacttataggtcatggagaatgcacagcagtgtttccttctgacctaaggacagcaccggtgatcgctttatgctccacagggataccgagaataaggttaaagatagcgtttagagtaacaaataagacttttccccctttgtgatttttgaaagctatttattaagggtagcttgaggttgttttgtttttcagcctgcagtctgtcaggtgtgactggggagtgtgtttctcactggtctccgtggactgtggaagtactggtctcgctaaagaagcagaagggcagatatgaaatctggagacatttacataaagcatgtgcttcatgtgccctgtccagaggcatatgtcccttcttcctacctttaattgtgttttagagaatggggccagcagtaattgtgggtggccaaatgatccttgagctgtttggtcctctgcggcagggtgtgtacgggtccatcatgagccatctcagctctttctcaggccaagttctgcttcacacgggccaggttggccactagctgggactctgatgtttatcctagaagcacggggtagataggattaaatatgatctttttaacctgaattctttgttactagggaattatacaatgtatgtgttgcatgctttttcttttttaagcactaattcagctggatatagtggtgtctccctagagtcctcctatttgtggggtggaagcagaaatattaggagttcaaggtcattcttggctacaaagcaagttcaaaaccaacctgactacccgagacattgtctcaacacatcaaaatcaacaagaactagagagcatcataattcagtgcagccgaaggcaaaacattgatttcatacctttgttctttagtgactgtgttttatagataaactctggtttgtgtattctaataaagagcttcttgaattattttgttattttcagtgtggggggacatgcatgcatgacagttatgtgtgacaacacacatgtggaggccagaggacatccctagaagtcacctgtcccctttcatcttgtttgaatgagggtctcttgttcatcaatgtgtgcaccaggctagctgacccactagctactagggatccttctgtcccctcgttctgacgtgtaggagggctgagattcagtgtagtactcacctggctttatttcagtgtacggggccaaactccagtcctgtgcttgtgcgacaagtgctttactcaccgaccccatttcccaaccagtattaaaaactagtcttttcattcacattgaactctggtatgtaaacttatccgtggttgcttgcttaaagcggttctcaaatagtggcggttctgtcccgttcaccaacatgtagtagtttctgcagacttcctttagttgccacagtttaggggaaaagatgttggtgggaactgggtgggcacttgtgggttggggcttcttgctgttttcatttttgcatttgtgcaggaggcctctatcacgtacatccagcccagagtgtctggagtgctggggttaagagcctggctttaaagaatatgtctgggtggtctgttcataaggagtaaaacaggctctgtgtgtgtgtgtgtgtgtatgtgtgtgttggggggggggggcggctgggcatagttaataaagaaaaagagctgtcatcgatacagctttagggtaataaagtgtctttgacagggccaggaagatggctttggataaaggtacttgttgccaagcctaatggcctgggttccaccccacaacctcatgtagtagaaggagagaacttgctcccacaagtagtccattgacctccacatgcttgctgtgacaaccgtgggcccacaagcgaaagaaagaaggggggggggagggaggaaggaaggaaggaaggaaggaaaggaggaaggaaggaagagcaagcgagctgtggtagccacggccccacatatgcactagatagatagatagatagatagatagatagataaaagtaaaaagtttttaaaatgtctttccaattcaaattattggcaaagttccttattttaataaagcttgataattaataaaagtatagtaaataattacctgatatttttatgcatgtttgcatgtgtgcgcacgtgcattcgtgtatgtgtgtgatacttgggttgaaaatcaggaccttgcagcctcccactgagctacatgccctgccctgccttgacaatttcttgcaccagctgtttggagtggggcttcattggcacagagagaagcagcaagtgagagctctgactgtgggctctgcatctctagatggggcctgggcctcatctctcacactgtgagaatgtaaaaagcacacgtctgtggctgtcactgtgaggttgaggctgacgtgcaactctagaagcagactcagctcttagagctaattcagtctaacatgccccctttggggatgaaggagccagctccaaaaggttagctttccttttctaatcttctctgacgtgtgtttctctccctcctttcagttcttaaggcaacttcgcccgttaattaattcacttttcagttaatcgtgcactcatttctgacaccttttattgtcatgccgcctgctcttagaaatcttcaagattaaaatgttcacgcatgtgcttcttgactccttaattagattaaactggctctgcaaatgggataatggtggaggtacctttgtgtgcctgcctgtacccagagatgcatgtggtaaatttcagacccagagaagacatttgatgacctgatcagactgggtctgcctgagcaagtaggagaattagaaccaccattggtagtcgtccttcatgggaagactgacttgattctgacttgcctcctgcatgggtagctttccctgtatttgagagggccagcggtgcctgttactatcaatcaaggctgacttgtaaagaattgactctcgacaatgtttcatccaaaattctgttttcttttgacctaacccagctccttttttggtcacatgaatggcatatatgtgcaccggatgcacataaactactccagcccacttctggtagacatggcgattcccaaggtgtggctggtgttctggaataaacagccttgagcgggtgttcttctggcattctggtgggatttagtcacacaccctctcatcttggaaacaagtggtctctccagagctatactaagctccgcctacctctgtagagctacactatgttccaccccactctacccagcctcacagaagaggtagttctctgcttataaaacttggtccctgccccttgtttagaagactagagagggcttgcacatgcgacccagaaactgtctgattcctgtctcttgattctcccttcacacataccccactccattcctaccacagcaaatgtattctttctgttgtcttctaaccccctctgcctgctttggctaggtttgggtctagggaagtactggtcaaagtgcagaccatggcccagtagcagaacttgttagacagacagatgtcaggccctgcccctgacttgtgggttccaaggagcctcctataataagtgagtgtgaagaagccctgatctgatgctactttcaggagggaacacagcagtggttggtcgccaggaacaatgcaaacttttttttaaaacatatggattctcactttcctcccatgcatccatcctccagcctgctgtctgtgtactgcccagactttgcctggaaaggaccccttctctgaggggtcttttctagatagttctgtccaccggtgattcctgcttcatgcattcatctctgcttgtcttctctagccaccttggaagtcccatacttctctttactgtgtgcgtccccatagaatccacatctgtggttctggctttctttcccgaatgtgttctctgtagaatcacatctgtggttccagatccacagcttcaagcaatcagagactcagcagaaatccgaaaatatgtaagtgagaaaactgcatctatattgaacatgtctagaaccttcttccttgttaccctttcctcataactccagaatattattttccatatcactgatattgtatggagtataataagttctatagaaatggcagaagcttcacagaggaatttaacattaaatactgtggcatagcaggacatacaggctttgagcacctgcgtgtcctgaagccagcactccatgaacactaaagggacactgtagtctaattattgcctgtatacacatagaagcatgttagctccacagcctcgcctatggccaccatgaggtgagcactcgtgagcacaaacttattgataactgatattcttaggcttcggagtgtacttaaaagcttggttgtcaattattccttaagttatgcacaaacagacttgccagctaatgtgatgcaagtaatgaaatctttgtagtggtttgtaggatccagtattgttagtctctggattgcaatttcaggaggctagtcttggaaagtggcggcattctaagttgataagtgtgttccacacagtgagtgtaaggttttagtgtactgtcgtcctgtgttgataaacatatgcaaataagggaaaagaccactcttaatactgagaaacagatcatctttcccccatatgatatgctagctgcacccaaattagtaaatgctaaaatgactatggctgataaaaacattgcacaaagtctttttactttttatataattaaagtgagctctccacttgatcgtcatcactgagataaacccagtcttgccagactatctgggaagattaatgaatcagaccctaaaatcccataacattcgaaaaataactactgtgtactgtgacttattgaggatacaaagaagttcctgggctctaagatttacgtcaatcttgtcagcccggtgcaagcctccccttggagaagtcgactatgaaaagaccattgctttgagctacacggtgacctaagtgaagttcagctttcacaagttgcgaagtgtagctagatttatggcaggtctggccaccttgtctgcctgccctccactttccaggtgtgatttgtttcataatgtttattttgtttatggactttgcttaataagcaagttgtttatgtatgatgcaaaaggataagaaaaagtctcttgatgttctgatgctgatgttctatgggcgccttgacatctccacagggcggggttatcacctggtgatgccaaccaaatcatcgaccattcagacagacaaatgtgattcttgttgctttgatgagtgtttgtgtctacagtgacaggcagtggcataagagaattgcatgtatttgtgagctttggtcagtctttttttcaaattaggtgaaggtaagagtacacattctctaaggggtctttgtcttgactgaagggtgcagaggtcacatgtagaaagctgggaatccagaatgtaccatgcattgttataaaggagaagccatttggtgttttcagataaaaatggagcttcccagctctgaaactcagtagagtgcagtgagggataaaggagagactacaaacaaaacacaaggaaaaggggaaccctgcctcctaggggtggagtagaatgtaaatcagatgcaaatatccagtgggctaggaacaacttaggacaaggcttggactggggccccacagagatagctcatcatttaagagaatgcactgatcttaaagagggagtcaggcctcaggcccaggttcagcagcttgcaacctcttgttactgtggcttcatgggatctaacaccttctgattatctacactatcagacacgtaacagcaaagaatacctctctctctctctctctctctctctctctctgtgtgtgtgtgtgtgtgtgtgtgtgtgtgtgtgtctccccctctcccccccccccccgtctctctgtgtctctctctccctctctccctctcccccctttctctctgtctctctctctctctttgtgtctgtctgtctctctcctgtgtgtgtgtgtgtgtgtgtgtctctgtgtgtgttaaagaacatctaactagagctctaagatgtgttatgacattataggatcctctgtagaaacatatacctctttgccacgacaaggttatatgactgtttatcgcataggtctctaattcagtgaactaatgtggttttatgatcaccagcccaggtagtacctggacaattgtaggtcagtagaatcctgaacgatcaagcctgcataaaacactggcgatgagtcctggccacagctggctgaaaaaggaaggtaaatggagtcacctggcaaagatatttgccctttctcaacatgatagatgctatatttagaggaaatgtttgtggtgataatatttgaaagtttgttttgtaatcctagggagcttgggttgtttcaactggaggggtgtgggaagggagggaggggggagacaaagggacgggagtgtgtccaatgggagaggaaaatgagatgattaattggtacagaataagaatagaaagcacgtgggaagcagaatcttgaagtttcagggctctccgttagtcattagttgaagattttgctctaagagaactgatagaggcccacccacatccaaaaggaatttccagccttccctttagctgcaggtagaatgttctaaatatatcctgttctagcctgggttctttccttccttttcctgttccctttgctccggataagatcaactgcctgctctttgcctctgtggccattcctgtttccttcgctctgtgcccatgtcccaggatcctcttgtactggtccctctacaccagcagttctcagcctgtgggtcaccaccattggaaacacatttttccagtgtcttaggaattaggacactgctcagtagcaaaaatacagttatgaagtagcaatgaaataattttctggttgggggtcaccacaacacgaagaactgtatcatggtttacggcattaggaaggttgagaactactgctccacacgcccatgcaaggatgagtcttcttatacattcttacaccctttggggtacaagcatctatgagacggcttccttagttcctttctgtcctctctatgctcaggaccatctccctgtgagggtgctctgcacactgagtactggctgccctaagcatccaataggagcgtggctaaatgaaatctgtttgaagattacacaaagtctctcagtcagaagcaagcgttctcttaacttgtgtttacagagctgtttgtactgggctgctcattcctggcctcataaagaaacccttggaggacagccacactgcccatgaagtgcttagagatactatcttatagtttaagataggcgggagacgtaaatggagtccagtctttgtgtacgtacatggaggtgggatttgtttataatttgtttcacatgctagtgagatacattaaggcagtggttctcatccttcctaatgctgcgaccttttaattacaattcttcatgttgtgatgaccctcaaccatgaaattctttttgttgctacttcataactgtaatgttgccatgtatttgctatgtaaatatctgtgttttccagtggtcttaggcgacccctgtgaaagggtcattagatacctctaaatggatcatgacccactggtttagaatcactgcattaaggcatctgggatgtcaatcttgggaaaagccagccagtggattctaagaggcttgatgtcattgactccctgagtcctactccaccttctcagcatgtcaggactcgataggagcagtgctattgcccctctctacagtggtgttctggggactctatcaccctgaaacttgcctctgtattctggggtgtgcactagtatccacactctggccagccaccggggtctacaggttgcgtaaacagggtgcactgtagttgtttgccattcacttgaggtagagctctttcccaacaaagtgcattcagccggaaaggaagagattgtttcctcacaagttccggagaccctgaggaacactaagtggcggccaccagaagacttgctgttaccacagtgacatctttattactggcatttgctgggaaaagtgttcaggaacaaggcaagaactgtagaagatattccgttttctctggggttctggctttcattaggactggccagccactcggacattggtgcttgctttaactcctagataaattattagtgtgttaattgtcatgagtcagagcctctaaagtgtcttcccttaaagaggttgagccttcatctcaatctcttgtcgtagggtctaaaaatgggagcatgagtccaaaccctttccagatcataaactaattctgagttaatagagcgtaggcaagtgggattctatttgagtgttattttcagatgcctcgagccagattgggacctttagcacctcaaaagtccctgaagtgaggattaagagactagcagtcctgtggcttctggccttagatggccttctaagtaggtcagagcctcccacaccactctgggatgcatagacctcggtcccttcaacatccacttctgagactcgccgcaggaagctaagatgggctttcttctcatagagtgtgtgttggctgaacctgggagcacagtggcttccaaacaattgattcttctaattccggagttacccaaatgtgccctaaaggcttgtgccataagcttacatggtgacgcaagagcaggtccttgtccagaagtggtttaatctaggatttcaggtataagtgattggtttttggttttttgaatttttggttttgttttttttttaatggtgctggggactgaacccagggcactatggatgctagtagccaggcattataacgttgtgctatgtcctcagttccacaggctgcaattttaagaccaggcagaaatacgtacccactgcaggatttgctctggcggtagtttttcttctgtatttgttcctgttgttgttgttggtggtggtggtggtggtagtagtggtgggtatttatttatttatgacaggtatcactatttagccctggctaacctggaactagctatgtagaacaagttggctttgaactcagtattctgcctgcttttgactgtctattgctggaataaaaggcacacaccatcagcatatgctattttttttttagacttgtctgtgaacacaaccaccttttctagaatgtaacaggtaggctaatgctgattttgctgagatgtggcctgtgtgctggctagtttatgtctacttgacacaagctagagtcatcagagaggagggagccttaattgagaaagtgttgccttaagattgggctgtaacgcaagcctgtagggcacttacctaattactgattgctgaagctccagtggcctaatggataaggcattggcctcctaattagtgattgatgggggagggaccagaccattgtgggtagtgccatccgtgggctgatggtcctaggatctaaaagaaagcaagctgagtaagccatggggagcaagccagtaagcagcacccctccatggcctcgacatcagctcctgtttccaggttcctgccctgttttaagttcttgccctcactgcttttcttaatgaactgttatgtggaactgtgaatggaataaacccttttctctccgagttgcttttagtcacagcatttcatcacagtagtaactttaactaagcctacatccagactggaggcgacatctactactggcttgtttggagaatgccagctatgtgttcataccctgacttaattgcatggctcttaaaactttcatctgatataaaccatgtgtggtgtgtagacctgtaattccagccctcaggtggggcaggcaggagggtcaaaagttcaaggttctttggctacctagggatttttccagggtagcctgagctagagactcttaaaagttttgtttccctctgtggtagtttttcttcctgttctttggaaaacaaaaaacaagcaagcaagcaaacaaacaaacaaaccccataacattatataatatattgtctagactagggaaggtacctttagaattaaaggttgggggtacaaaatgatttggaggagagaagtttgtactgtaagaatttgaaagatagcatatctttcatagatagactataatacatagaatagaatagaatagaatagaatagaatagaatagaatacatagaatagaaaataggaaaagcaaaggacagagaaattaccagacgaaggtgaaagttaaaataggaacaaaacaaagccgggagagctaactaaactcagcagctggccagtggggaggacagcaggaagacagcaatccatacatagcaggggcccagaatggtgaccgagtggctgagcctggagaacagcattatggggaatggcagagctgctgcctccaggcactcagtgctttagaacactgtgactggttctgggaacccgagggcctcagcacattccttttgcactagaaataacagtgtaaacagtgccccctcccactgcgtgtacacacacacacacacacacacacacacacacacacgcctctctgcctggatgaattctgcacggaggaaagtacaagtctagtgtccttgtcaggcaggtgaggcccggcgtggattatgagcaacaagtactgtttcttattttccacaaagtcctttaaaacaaagtgagaaaggtgtgggggcatgggggggaggggggtcttgggatcctgagtttcaggtcagtcaagttctaaggcaagattctttctcagaaaaacaaacaaataaatagagttaggcaatagtaacgggaagagaaaggtttggacgtgtggtgggtgggtagtagcatttacaggaaagtgccgagcacagccctagccaacacacttaaaaacataaggctgattcattagcaaaacaccaatgaccaaaagggatccaagaagcagcagcctagagctggatagaccagtttctatagaagagacaagaagggcggctgagagcgagaggtcatgggaagagtcaggcaggcgggcggcctgggtttcctttattttcacttgtctgcttttagctggtgtagccaacctttaaggaacacaaagtttcagtgttacacatcctactggaccggaagacatagcgaggcacagaaaggctcccagttcacttagagaatgagcataattttaacctcaaatcttggtgctcctagggtggatggggagaggctcatgaagtcctaccttagctgaggagctgtttgtggttggtggctgctgggagtgggggcaggggaggggggcagagtcggttttcttcaaggatgctgtccctgaggggatacccattctccacccattctccagtagatggacctccaccgtacacatgtaaacagcgctagatgaatttggtaggctttatttatttatttatttattgtttttcgagacagggtttctctgtatagctctggctgtcctggaactcactttgtagaccaggctggcctctgcctcccgagtgctgggattaccagcaccacgcccggcaagcactggtaggctttatttaaaaaaaaaaaaaaatcacatgaacttgggagggaagagtggtggaggcgataagatggggggggggggataggcaatggatttttattaaaatgtattatgtgtttatgaaattgtcaaacaataaaataccaatacactttgaactatttttttaatggaactcaaaccaggtcctctgccagagcagttaagtggtaagctatcactgaagccccactgataacatttaagcaatgtagagtaatattatctatgcatgaagtttacaatagcttattaaccagtagatttttgggtaaggccaatacactgtagtcagtgtattacactgtacttgggagttaaaggacaggggactcttccagttgtcgtgggttgttgtacaaatgcgtcaagagatgtgtgcttgccaagacagcagaggccaccgactgcagagaacagagctggctgataaaggtcgtagatattaataatacaataaatctgaaaaaagcaaaccaggaggaagaaaaataacaaaggtgctcccatgtgcgggcgcgcgcacgtgtatttgtgtatgtgtgtgtgtgtgtgtgtgtgtgtatgtgtgtgtatttcacaacagcagatattcaaaagtcaaaactctcaaactgttttgattaaaattaggaatcaaccaagttcccgccccccttttacaatgatttaatattgtactgaaggcttgctgaaagggttgtgtgcctgtaactccaagatcctctaaggaagagcagtttctaaagcgagtaagaattgtcaagggggctaggtttaaaacacaaacaataaacattctaaagaaaatgtctgttctttcaaagacaaatgcatagaagtgtaaggcaaccattgatcttacttggggtttctattcacgaccagaaacaactcagtggggaaatggtttgttttctcttatagctctctggtcacccctcatcatggagggaagtcaggataggaattccaggcagaaacctggaggcaggaactgaagaagaagccatagagaaacagtgtaacagcttgcttagcctaccatctaggaccacgtggccaggtgttgcaccaccccagtgacctgaggcatcccacatcaatcatcaatcaagaaaatatgctttgcctccaggcaaatcttaaggaggcattttctcaatgaagaattcctcttcctagaagaccctagtttgtgtgacgttgacaattaattaattttttagcacaattgagcagttgtcaccttgacacacaaaagcttgacactgctaaaatgcccttcttgtttgtcccccagatctcatgttaatatcacaatataaagcctagtatgacttttaatgttccaccgtctgttttaaaagctcagtctccttcaaatatacaaaggctctttgaaaattcacagtttcttaagaaccagagtccctcagctgtaggttcctgcagaataaaacgagttacacgcattgaaccaaggaacgctcacaatttcaacaaagtaaaaccaacacccagcactctgtgttgaatcatagagtcgttgaccttctgtctgagactcattcaaaatcctctgggtggtctcgagcccggccattccttgacaggacacatagcttgtctcctaggttcaggccagctctactctacagctattgctatccttgttgctcatcccacagtcctggcatctccagaattctggtatctctgttgctacatggctgtcccttcaccaatagccttcctttgggctaccttcaggtactccgaccatgtcaaagcattccacgccccatcttctctgcatgactctttcaatcctgaggtatcaactgcgtctgaggctgcatccacaactcccctgatctctcacagtgccaatcttcagacgctctccctgtcttcaaaccaggaccgcctgagacactcatacacgttaccagtttcagctgcggacacaaggcacatccttggctctcgatagaccacagctcctggtcgctgaccccgagcaaccacttcttagatttcatctcaatgatgctggtctcttcttaatcgccactaatttcccagccccagtgactaagtctgattgtcctaacaaagcaaagaattcccatgagtggttctgtggttctgtggttctgggctcttcagagttgattcatcagtcccagctggccagaaccactgatcctgaattcgaatggtcccagtagtcttgaagggactctcaaaagtccctctgaagcctcacaagtcaggctccatcttctgcactgctctcaacagtcttctctttcaggctcttacacaacagcccattaagctctgctcactcggtagctgtaagagcccactcttctgagcacctccacagtccttcccacggtggtcacagcgttcacatcccacactcctggtgccttttctgtcttcattttctttctgtcagtgtgatatacaacatgacaaagcaacccgggagttttatagtttacaggtgtactccattaggaaaggcggtcaggacaggaacccaagggaggaccctggaggcaagaactcaagtagaagccagacaggaacaatgttcactggctagttcaacctgctttcatatactgtccaggaacaccacttgcccagggttggcgccaccacactgacctgggccctcctacattaaccattaaccaaggaaatacccccaacatatttgcctagaggcagtgtgataagatcttctttaaactgaggttctctcttctcagatgaccgtagcttatgtcacgttgaccaaaaataataataaaaaaataattaaaaaaaaacaatcagtataccattccaacatcattcttagtgaaaaatatgaaataaaacctgaagggatgaaactataaataaaacaatgaatgtagttaacgcaaaattcataagtaaatttatggagatccttttaggaattgcagagtgtttttttttaaattggataaaaacaatcctggtgtttctatcaaaggataaatgcataattctggggagaagccaaggtgaatgtgagggaaggaaatcaagtgagcacagaatgtgagggaaggaaatcaagtgagcacagaatgtgagggaaggatgctgagaaaggttttcatggtcaaagccacgtgggatagattcaaggtccaaagaattcggtggaaccaaacagagagtgcgtggctgtctcactgggcaagggatagatggatgcacagcgttgagaaaagcatgttgctatccggtggacagagcaggctccatcatctcttcatctggagcgggggtggcaggaaggacgcagggatgattctgtcagtgtgatctgacaagccccagaatcttctgacccctagccgcatacagacagtttttaggaggcaaatgtaagaaactgtaaaatcgtgctgtgtgggaggacttgggcaaaatttaatgcgggtaagacagtggggcatatgttaagggaaaacccttgtgtagtagaagatacatgatttaagtagagagagtagtaatggtctcccatccaagtgctaaccaggcccgaccctgcttagcttccgatcagatgagattgtaccagtaacttagaaatggataagaacagcatattcaaaggaaaggtgagtaaggaatctattaataaacatgagccgagtgtggtggtatgcacttataatcccaggctggaagactgcaggttggctgaggaacaagactgactcaaaataaaacaaaatgtgtaagccacagagaatagatgcagacaaccggcaaacctatttaaaaaaaaaaaaaaaaaaagttcctcttgctgggaagtacagagtaaaatgaggcactgcttgaaacccatctgactggaaaccgtagcaaagtagatattgccatgatgctaattgtatgagtgcaaccaaaagcctagcagtcatttctattatcacatttatatatttaaggaggggagtgtatgtgcatgtgtgtatacatgcatgcccacctgtgtgtgtacagcttgtgagagttggttctcaacttcagcgtgtaactgtgtttcacactctggttatcagccttggtggaaagcccctttacccaaagaaccatcttactgttcctgacaaacagtttgagtggttcatgatttcagatgcttcagtccatgggtagctgtctccatcacctggggccttaagcaactctgaaccttgaggaagaaggaggaggctgctcacctcatgatggaaggcagtagagccatgccataccctttctttcccttttgctctgtctggggcccagcccacattatgcctccattggcagcacacccctccccggccttggttgatacactaaaaatgtattcacatggaatttcagctctgcttgtgtaacctcccaggtgtcccccagtgaccaaggttaaccatcacaatgtggtaagacacctggctctgttgcaaagcagaccacagcgtctattacaataaaattcactgatttctcagcagctttcatccccgtgtcttttagaagttgcacacacagtgctatgtatagatagatctactttgccgttttagtagcacaatcctgacgataagaacggctatcggttgaaaatggccagcttatggaaatttcatgttctgtaactcgtcctcttgaagaattagcatagttctgggtcagattggctttgatctcatgagtccaagcatggggaagagctgggaatgttcctggtctgagccggggtgtggagcagaggctgatgcacatggcaagggacaggacagcaggattgccaaacctctcctccctgccagactaacagctgagctgctgctaccgggctggcttgcctgtcaaccgcatccacggcttccctgcggaggaagctgtagaggcctgcggtttgaggttagaaatcctggctcctttctcttagaccgtgggttctttttttcttattccagcatgctcttgagttgatctcctgatatcccccctggattttctgagcatcttaattaaatgtctctctctctctctctctctctctctctctctctccctgtctatgtgttgctttccagcatgtgaaatggcttgtgtgtttttcaaaatcccgttaatgtagcttaggatgctatcttacatctgccctatcttgaaaacccccatggggtttattggtgtagctgtggtttctgaaaaaaaaaaaaattactagtcttgaatcttggatcaaacctgaaggttcccagagtcagactaggcatacagttagttggtaaagtgcttgcagtagccatagtcccctccccaccctcgtgaaaacaaaggtgggactcctaatgtgcacctgtaattctggttccggtgaggtggaggcaggaggaaccctgggacccactgaccagcctagccttcctagtgaacatcaggccagcaagagaacgtgtgccaaaggagcagatgtatgacatttgaggaacagtggccaagggaatacatgtacacatgggtcacccccccacacctccacccctctccacccctcccnnnnnnnnnnnnnnnnnnnnccccagttaaaagagcaagcttaggtacttgagactcaagggcttctgccttttagtccactttggtcaagaacgcatgatgaggttcaaggtgatgagagcatttttagcgcaaaccaggaagcagaaaaggcaggatggagtgaaaggagatctatccttcagagcctggcctggtgacacgctccccaaagctgccaggcttccacatagcacaaccctgggaagttgcacactagctcctactggctgcagctggtgctgagaacagcatctctcctgtgcttgtattaccctgatttgtcactcctttgccagcctggatgggaaacccatcacttttatgtctttaattagttgaagtgtccagtactcttagtgctttcttatttcctttctataaagtacttgcttgtagctttttgtcccttcccgtctggttggttgttaattttttattggttttttggaccacttctttatgcaagcttgtctcacacccaatgtattgtatatatcattatgtagatgtttaacattgtgcttttcagtatatcccttcagtagagccttggaacattaacgattatagcattatttgttcttgttaaagataaaacggggttttcccctctcaatggaaaaattacagacgtttctaagtctaaacacaaagaaggaaaagattatcaactacagcatcattgcatacctgagcagcttctctctgtttaccttttgggaggaaatgtgggcttttctgattgcccttgtaacattgtaacttactccaccaagtgatacataatgacattcggttttctgggtgttcctcatcttattttatcatgtctgctggaaggttctagttttgtttttgttcatgttttaagaaagtggggaaagatgtgaatgtctttgggcaaacccaaaaggttttaaactggattttgtttttgtgttttgttttttgtttttttttttttcctcttggaaatgggatgactaactaaaaagaattttgagatctaaacacgtttcctatttatgttcctgtcagcataaagagtcattggacttcctttaaaaatgaggcactttcaggagacacattcagaaagaggcaggtctcaaaatgaacttgaaaggtttaagtgggagaaaggccagtgggagagtcctcagagtgaggtttagggagcaggcaggagccagggcccctcagggcggtgtggactattagaaagaatttgtagttttatggttgagagtctccctgttgccagaaatgggtgtggtttgctatcttttattgttgcaggtgagagtggcccctggctagttaggaggctgttgcattagcctagggcgggtgatgatgtcttcaacaccagagtagtggtggcttcaggtgtggaaaggagagagatgggggctcactgggactgtagagccctttcagctgatgggctggatgtgtaagtgaaagacaagaaaagagtgtgacagccccttaggtgggggtttggaggtgggggtggggtgcaggggataggcggcagaacctaagatctattgaagttctttgctccttagacttccaagtacaagcaagctgagagcctggccagtgtcgaggggacatcatggtgtttgtccatgtgttcggggttctagctaactgtccttgaaaactcaaaatcaggaacatagtcatttcccaaacgggaacatatctgtaagctgccaaaggtttcggggatacagatttggaggccatacgctttggacagagcagtgtacagccttgtacattgaatggtatttggagaatccagggtccttttcctcctctcggtaaaaccataaccttcttttgatattttcataagtgcctaagaacacgatcatgggaacctgcgaaggatgtggttacacatatatcctcttttatagttaggcattggagcagtaagctaaaccaagacaggagagtcttattggaaggcctttgtgaagaaattgaagacccggggtggcaaagctattccggtgttacataaagagttgggcctgcacaagtcatccttgttctgcttcttcctcccccagccagtgtcccagtttctcttcttctcctgtagctgattctgagcaagacagaaacttgggcttttgcattaagcatccgagttctctctccccgggggattactcatccttcacgaagtgacagtacagtcatgtcgccatttttaaataccttttattaaccatagcagatacaatgtgaagataaaaggcaagcctatagatcccacacatcctataaatccacgcagcccgaaagagagaattaattggtcgccaccttgttacctttccttccagccctttggctgtgtttgtaattagatatatagtgacagtttgtgagtttgacataaacagtagtttatggtaaacatttcatgatagcttatgtttttaataattcttagagactacatattataggttaaatcatggaggctttttagggaaaaaattcctgaaggtttcactagttggcagatccttttaagattagaaggaaaataaaaacaccaaacctgaactatctttggtatactaagaaattcaaattttatgttcttaagatcttgttttgactcatgtcactcttaactattcatattcctttaggatatgctaactaaactttaattatcttttaaatatactttttccatggttcaagagatagacttagtgttgtgagcttcaggaggcttcagaaagaccacaccaggccaaacagttccacatgaggtttattgagggggggggggcaaggtggtggcagaaagagaggtggggggggcaagagagagagagatatcagaggggcctttatatatggatggtgaggtggtcgcaggtaaaggtgggaggtgagccaagtggattctgggaatatggtggctattgccttggcaacaggtgtgcatgtagcacctatgtgatgtcacaggtttcggaggtcctgatgccaatacttagagtttaagagcacttgctgttgcagaggacccgggttcagttcccagaagccacaccagcacatctgatggcttctcactgactacacctccggttccagaggatcccatctcttctggtcctcatgggcatctacatggtgcacacatgcgatacttataaaatagataaatcatgaatatacaccttacatttcaagggtgtgtgtgtgattgtaaggtatatgtgtgtgtgtgtctggataacagtttgcctcttaacattaagatagaaggtactgggctggactcatttcatgaaataccaacgagtctgtcttgcaagcatgagaacctcgtccatagaatccacatttagcaagtggtttgactaataatgtttctaagacctagcttataaacaacccagttgtctaagaataataaacagtactgagcaggtggtttggtatacatcaggagtgcccacgagtcatccaaagctgcacatttaatcgcagataatacagataggtgggaacatcatcatttaaaaatgtgcactcctgaggattgaacactgggccaagtacattctaggcaagccctttacctccttttcgttccctctcctcctcctccactttgtatatgtgaaaagaatctcagttccctaggctagtgttccggtccctctgcatcccaggcagggctttaatttatgatcctattgcttcatcttccacaatgcctgggaatagctctctgcgttttactgttataccatagccaggcagcgtccgtgtgacttttaaataatactttgaaatgtcatctggaaaagaactgtctccaagaagtaggcaggaaggaaggcttctggctggcccttccgtggcattcccaggtgtccttcctggggcctctccttggtcagagaagactctgggccatgccgggaaggattgctgattcttttcctccaggtgctgactgcgggctgcccgtattgtgaaactgaggcagcatcagtctgaagacatcagctccttcctgtttatcaggtctggagtccttgcttttctcagcctggcatgtgcctcttcagcttccactggggagatgcctccatcatactccttggattcgtccctatccacagctatcctctgattccttctcccatggttccaaggccaccaccaccacattctgctctaggtcctgtcccttcaagaagtggctttatctggagccacagttgcctcccgggtatactgcacagtatctgtagctgtcctccattctcatgcctatgaagacctgctacctagggggcagtggcagagatacagataaacatcctacagtgcacaagccgtgccctaccaaagccaaccaagactgacacagccccaatatccaggctaaaaggctaagctaaactattttaggcaggctctctggcctgctgtgcccccttggttatctgaggtcttgttcacgtcatctttcactgtagtcttaagtaggggcactgtaaatttggggaaacaaaacatgggagatcaagctagtaggaatatggctatcactcttgtgtatagcaaaattgggctctagtttcttactataggcaaaaagaattgggtatagacttctggccactactaattaaaaacttttttaaaaatgtcttatagctgggcatggtggcgcacgcctttaatcccagcacttgggaggcagaggcaggcggatttctgagttcaaggccagcctggtctacaaagtgagttccaggacaaccagggctacacagataaaccctgtctcgaaaaaccaaaattaaaaaaaaaaaaagtcttaatttaattctgagattgttaatgactgcattgaagaataaactggtttctatggactccaaagaaggattcagttgacctgggaaccatgtttgactgaagtggaggggaacatttaatggagaaaggtcttgcccttttcagagtgaggttattctgcccagctttccagatggatcctggagtgaatgaagtgcaatggtgtgagccaggagtccacgtggatggcattttcatcctaatacatagcacgagttgtcacttacctaacatttgccagaacagagtcccacaggctgattggcttcagtatcacacacatttcccttcttagttctgcaggcctagaggttattaattaattaattaattaattaattaattaattaattttagaggtcttaaagtcaaggtgtttgaaatcagggttggttatttctctctctctcctccttagatggcaaaggccatcttcttccagccttcccactgcctgtgtgtgtnnnnnnnnnnnnnnnnnnnnnnnnnnnnnnnnnnnnnnnnnnnnnnnnnnnnnnnnnnnnnnnnnnnnnnnnnnnnnnnnnnnnnnnnnnnnnnnnnnnnnnnnnnnnnnnnnnnnnnnnnnnnnnnnnnnnnnnnnnnnnnnnnnnnnnnnnnnnnnnnnnnnnnnnnnnnnnnnnnnnnnnnnnnnnnnnnnnnnnnnnnnnnnnnnnnnnnnnnnnnnnnnnnnnnnnnnnnnnnnnnnnnnnnnnnnnnnnnnnnnnnnnnnnnnnnnnnnnnnnnnnnnnnnnnnnnnnnnnnnnnnnnnnnnnnnnnnnnnnnnnnnnnnnnnnnnnnnnnnnnnnnnnnnnnnnnnnnnnnnnnnnnnnnnnnnnnnnnnnnnnnnnnnnnnnnnnnnnnnnnnnnnnnnnnnnnnnnnnnnnnnnnnnnnnnnnnnnnnnnnnnnnnnnnnnnnnnnnnnnnnnnnnnnnnnnnnnnnnnnnnnnnnnnnnnnnnnnnnnnnnnnnnnnnnnnnnnnnnnnnnnnnnnnnnnnnnnnnnnnnnnnnnnnnnnnnnnnnnnnnnnnnnnnnnnnnnnnnnnnnnnnnnnnnnnnnnnnnnnnnnnnnnnnnnnnnnnnnnnnnnnnnnnnnnnnnnnnnnnnnnnnnnnnnnnnnnnnnnnnnnnnnnnnnnnnnnnnnnnnnnnnnnnnnnnnnnnnnnnnnnnnnnnnnnnnnnnnnnnnnnnnnnnnnnnnnnnnnnnnnnnnnnnnnnnnnnnnnnnnnnnnnnnnnnnnnnnnnnnnnnnnnnnnnnnnnnnnnnnnnnnnnnnnnnnnnnnnnnnnnnnnnnnnnnnnnnnnnnnnnnnnnnnnnnnnnnnnnnnnnnnnnnnnnnnnnnnnnnnnnnnnnnnnnnnnnnnnnnnnnnnnnnnnnnnnnnnnnnnnnnncacacacacacacatgttcagatgcatacacatttgtatggaggccagagaacatcctccagggtcatttctccagcactgtccaccttgacttttgagtcaggttctctcactgaccaggtaatctggctgtttcaacttcctcggtgaagggattacagatagacattaccatgcatatatgtatatatatgtatatatatattctgaaggatggagctgaggtcttcctacttgcaaggctaacactttggcatttcatgaaatgactccagcccagtgctttctatgtttatgttgaagaggtaaaccacccctccgcccaacacacatacacacacctacacccctaccttacacatctttttaggcgtgtttgctcacggggatttgtgattcctctgtggcttctttagcttgtgtctccaggctcctgccttgagcttctgcttgcgtccctccgtggcagacgatgagcaggaagtgtaagggaagtagacccgtccatccaaccacaagttgctttggttggtctctgttttatcacaacacacagcaagccaaggacaggtggtgatcaggctgcccaaactgagtcatgtacacagagggcaaggcagtgagcttcaggctctgggccccttgagggaagggggactgggattgtgggtgtgtagtcagaactcacctttcctgaaatacccagtctcacctgctgtttcttttcagtgcactagtcataggatggttatttttgtagctgctttaagctctctgagagccaggaagttgtgatttccaagctgtttggtatagggctcagctaaaaggacagaacaaaagctgtgacctgtggatgaagtgcccagagaaccagtgctctaagcaagccagacagaccagagattatgtgacctgtgctcgcatcccatacaaggttcaacaaccttagaggactgtcactcggagagaagatactgtaaaaacaagcacaggtaacttgactgtagggcactgggtaagaggatttcagctaattgctgagctgggtggagataatctagccttagctagggactgggtggagcttggcttgagtccctgttcccaccaagaagcattctggtcgagctgttgctgaagtgactcatcagcctaagcagctagcttctgggaggctttctcagatgtgttaaaacttgctggtgttcagagtgcctccagaggtgcgtggtgcatacactactttggagcaaggaaggcagaagaccagacagggtgccctagggttgcccaggtagacttctatcaacaccagtccaacagcacacatgccttgtttgtcttgattctcgaggacaaccacaggtaagaacaaaggcaccactgtaagttcgttgtgtgggtgtacggcatccactggcacagagcatgatttttgtcgtaataccgttttcctatcggtgatgttaccctaacacgtaccaagagttcccattgtaaatgtctttgagggttatggagagctagtgggatttttcctcatgtgtaaaagggttggcagacaaacgtaacggcggctatgacacgaaccctggtctgtttttgctttcttttctgtcttgacggtttagaaaaatgtatagtgttcatctcctaaaggaacacagggactgggtgtctttatatcttggtgtcttttatatctaatgaagagggtcacagattaaatcctgtgaatatcgttctctgatttagaagttgttgttttgggcagaacactcacaacccttcctgtcatgtgttgaatccctattcctgtgacgtcaaactggagaagagggtagtaccagccgtccttggcttccagtgaaattccatcttaggtcatgtagtggtttacttgggagactcgtagtttacattcagatccttagatggcagtcttagaagtcttacttccgtcaggacttggcttatgtaacttagtgtaagttactgaatttataaaaataaaatttttgagagaatcacagtgataggccagagcacattcaactgaattattctttcgtgtttagttgtcattcctcatgtgtgttactcatgcatgcaaatcctcggtgtgattaacatgtgatatttgtttctttaccgtcccatttggtgattcataaactgttagtttagtagtgtatctgtaagcctggaatacatgagtgtgggccacgccttctgttaatgagcctggttactttccatgggtattctgatagtgttgtgttaagacagctaggaggattaaaggatgtggatggatccaaaatgggacgtgttaaaagctatagtcaggacaccactttatttcacattgaaatgtacgttgtctatatgcatttgaagtaatttctggctaaggtgagcggagtaataactgaacttatataaagaaaagggaaataagcactgtcagagatgtgtggaggacatgattgcccaggcaaagctgaatccagtgactgtggtatcaggagatgagggaaagagggtttctagttaattagacaagagagaagagacaggagctgcagtggcggcggaggtggcagctttctcatgtgttttcacggcccctgttttcaggaaaaattggcttttctactcaagaagactttgtggagtcagtcttgcaactcaatgtggattttaaaaccacacatttgttcagaatgctgggttgttggtgttgggaactgttcaagaggagcggatgcaaggcaggagttccataaacccttaagaagtatggataccatagcccagaagggctgttggctggcctgagatgctggcattcctggtgcatggaaggggacttccttgctcataggtggtgtttgggggtagaggactggcttggttttctctatttcattccaggtgtttttcagttttttgtgtgggtattttgttttgttttgtttttcattagtctaaacctgctagggattttccaaagtagttttcaaggtcaggtatttacgtagggtggcagagatctttcccctggagttggctgctgctgacgtcattttgtacttatgcagagggctcacttacaggtgggccacctagcatccaggtttctgaggtcactcaccttggagccacagcaagagcacgtgttctcagccctgtgggtttttttttcccccagaatatattgggactgtgtccctccctggtagctcagaattccacagagggccacttggcatgccctcacctcagtaaatatttgtgtttcacttgttcctgacctatttggattatgaggggcacagagggagcacggatggacagtggacagtcaggtccccagagctgtaccatcccccaggccagtggttcttaaccttcccaatgccgcaaccctctagtacagtttagtttctcgatttggtgaactccagccatattattatttttgttgctacttcataactataatttggctaccattacaaattgcaatataagtatgtgatatgcagggttatctgctaagtgaccaccaaaggggtcacggcccacaggttaagaaaggctgcctaggcacaaatgaagatccccaccagcagtcttgaaatccaaggagattgttaaccacctttcttgaaaccctggcatcacccttcttcctccccgaagtgggcagtggttcccagaagtgaatccacccaactaactgtgggacatagtcaggtaatcacagactacctgcttccatctgagacacaggtcagctgctccgttcacctcagttactggaagaaggttcagagtctagctgctgattgacatccctcagccccgcccccatctgtccctgcctctgaaaacaaaggattgattttccttctagaaaatggaaaagagtgtggacaattctggaaaaccacatgatatgctccccacatcccaccccaccccaccccaccccacccccaaccaatccctggcagtgaagaatgggatttcagaccaagtgaaaatacagacctggcagattcaagtatgatcactggccagcactcactacctaacacagcccactttcagtgatgtaagctgtcttactcaccagctcttactcatgtggcctgctgcaggcagagagaatcacatgcgattataaacagcctcttctgaccctggtcagtgactacaaaccttgtcacagaattggaaggcttgtgatcgggaattcctgggcagaggcctttcagaatcccggggacatatctttgggacctttgccagtgtagaggtttgaaatactccactctattatcaggatgtaagcttcagagtcaaggaagcctggcattgtaagggctttgtcaagtgtgacaggcctctagagtttacctctattctacgttctaccctgttttgttgaggttttcaatagaatgagatctgaggtcaaaggagtgaatgttttacctgagatagatttgttctgtctagtattgtatttaagtaactaactcactgaatacatagtttaagcacttgccttgctcattgcttaaaaataatttctttattattcctgcacttcagaatgaatggtaactatcactttagctattgaggaatgtatctcttacacttgtcagttttttgttggactaatattcttttaaattatattctattttttttaacttggtttattttatgtattagtggtgctacagcagtggacagagtgaaggtatttctcaaagacttcatttgtaagcctaatcagatggctggtaaagtaggtggcctgcttttggtagctggtctcaatgaattaggttgcttcttgattccttgttggtgggaaatcctgcaggccaggccgagtaattctgttcctgggtatgtcaggggagcctccttctacaaaagaaaagaatggtgacaggagctggtgaggacgagtatctaagacatacagagaaacgggcaggagagaagaagacacgagtcaaggccctgtcacctcctgttggaggtgagactccccagagaggatgcattcatttcttcttaggaaaagcgccataaaaacttaatgctgcctgtgactcggggttagatgattggatggtaaagctccatagctttgcccagttatggaaaggaatcgcagaagctcacagcaagaccgagctgaagagcggtggcacacggtgcagcccacagccgctgctctagcatcctcttcttctgcctgctccacggcctcctggagttgcctaatcctgggtcctccctgggtgataattaagttgttggcttgttgtgtttatacggatctatatttagctctgcttatctatgtttggggaaggaggactcggagaacaaaatcaaaagcatccccctgagttcctaatggagaaggcaccagctgagagtgtcagcggcttgcttccaggctgtaaggtgaaactcactcatttctccaacccatatgtactgagtcctctggggttcactcccagcacaggtgttggagaggccacgagctcattagggcctgagccagggacttgcctctctacctgcagggaactttcagcctgctgggcctgactaaccataatactcgagtccacagatcatatacttatgatggggttaagagccataaagagaagcagtctaggaagggaatggcaattacacatgtgggtgtgcttctctaagtggttggggtttcttctgtctggtagctcctcctgttacccagtccagctggtcacgattagaatgtaagtgggggctgacactaggtttgtggtcggaagcctgctttttaacaaatctctaaaaggatcgctcccagggaaagctgtaagatagtcttcctggagagtgaatggcattgatcttagagcagaataaaaagatgtttactgggaaagcaaattctccatccatcccagaggatactcaagaatcatnnnnnnnnnnnnnnnnnnnnnnnnnnnnnnnnnnnnnnnnnnnnnnnnnnnnnnnnnnnnnnnnnnnnnnnnnnnnnnnnnnnnnnnnnnnnnnnnnnnntagataagaggagagacagccagaagcatgtggaagggtccagactgaacaaggccatgagaggagggggaggggcagcaagcaagaagatgagaagagagaggcaagagtggggaccaggatccaagaggggaggatcaagagagcctgtggccagaatatatgggaaagagaagctgagggaagagaagggaggggaggggaggggagggaagagaagtccctgaactaagagaggtttagggtaggggttgcgtgggaatgagaagaacagagcggagccacaggtgcccactgagtcttagatgggcaccacagttagccatttgtcctaagtttcttttgggacctggcacagaggactctggatctcttcgtttatgaagttgtgttagatgaggtgacctcagagccccggttttccccttagggttagtatccattgccacagctactgagtctagcctggtaacttgtcactctccacctaaaggataaatgctaggagagaagcaagtgggagtccacaaggagagactcagctctgtcctctcctgaactaatgcattcacacacacacacacacacacacacacacacacacacacacacacccgctggaaataaataaaggaagcttttctcatctctttaagagagcagtgaccgtcatctcaatctaagcatcaacaagctggcagctcctcaaagctggcggctttatggggctggagtgagagtcgaacctgcacacacacacacacacacacacacacacacacacacatcccagcccatagatagcgcgccactgttagtgaaatgaagatggtgatgtttggctatttgagtcataagtggcatagttgagtgtaaacctggccatctcttacttactccagtgggcgtagttgtctttgcctcgctgtgtcactccaagtcatggaaaccaagccagccactgaaggggaatggggaaaggcctgcctgtctctgtgaaacagataactcttggtgatccatggtacactcccttcaaggtactcctcatagaaactgcacagtcccagaaagtttctcccaacggcctgcatcccccttcacatgggactcctcccttctctacttctggtaatcatcttgtaacctgtgtacatcgattattctgccttgtttgccatctcttaattgccccttcctgctgggataaaagctccagtaggtagggagtttcctctgtcttcttccaaggggttctggacaattgacacattgcaggtctccatgaataatgaagggagggaaggagaaagctgggctccaagagctgtcctgtgagtagccacaaggacttgatttgatcctgaggtgagcttgctaggacttgtggtttcctatgacttgtcaatgctgcactgacggtgagctgtctataggtcacctcagctccaccttactgcgtgaatacaatggcattgcctgggtggctcattagtgcttagagggcaaagttaattgcccgtctctccagtttgcttttctacgggttgtagtttgaccctagccatcgtgacaggaggaggtctgtctacagcagtgacttggtgacactcctgatagctaattctcagtacagccactgatttgttcactgtgggtctcctgcctaatggccaggactggcttatggtgttcaacgtgccgcagttgcacattctgctgtggttttatttagctttaatcccttattaattactctttaagggtggattagctttcacttacaacctctggtccatggctattagacttctttgttttaggcacggcatcggaaaaacaaccaaagaaacctccagtgaatgcatttgtgtggctggcaatccaatttaattttacctttaaaacattgcaccccagaatatgaatctatagggtccaggatacaaatagggagtctgtacctctctatctctccctccctccctccacacacacctttatcccctattttctaaaatgcctaatgtgtggtaagaaccagtaccctaccctctaaggagtatattgttgtgggctctctgtgtgactggaatacgatatatgcaaatgaccaagacatgcccatgtttgcagagagctcctggaacaacagcagaaatggagaaagagtaaatgggtgctatactgatggatatgggcatggtgtcttcaagggcgtatgcagacacggtaggggaaggcatatctagcagagagtgaaacgtggtatgctgagaacagataggagcgaaacacacgaaagatgatgtcgaaaggcaggactgccagagccgagcaaatggggcagcaggcagttctagagctgggcagacttggttgccacgtggttggtctttctgttttaggtttcaaagtgccagtgaatggaatgagcccagcatgcttaacttaaagatgagtgtcggcaatcagccttatttaaccaggtgtagaagaggttggggtttgaggcttgtcttacgtggggtctatactgtcctgataaaacaccacgcccaaaatagctctagaaggacaggctttctctcatcctgcaccttgtagtttatcatgaatgacaagtcagggaactgatgcagaggtcacaaaggatgcttactggctttcttacagttcccgggaccaccagcctagggctggcaccactcacagtggacgggactctcacatatcaatcacaaaccaaggaattgtcccacaaggcttgtccatggggcagtctggtaggaacattgcttccaataaggtttcctctccccaaatactccaacttgtgccaagttaacaaaaactcagtgggaaaaacttctatccttcagggatttaatctatggggtggctaggagggcccatctgtatgccccaagagcctgattagactcaatggttaatgatcttggaggaagagatatacttcagggttcaagtgagagtagccagagagacctgcagagtggagagaggcagatgacgaagcctagggaacagtgacattgaacttgaaggtttgtaagtctgagttctttcctatcccctttttatggagaaaagtctggcacctagcccagcctcgatgaccttgaatttctggccctcctgcttccacctctgggtgctgagattacaggcatgcaccaccacaccctgttttaaggtcttagttcttgacaagagtctgtgtactcttgcatgcctgcctacattctttcgcaagacagttgtattcagattgtctttggagactcttcatactcaccagtaggaccgctggcttcaggcatctcactccaggaccagagagtatcttttgatcagattcctgagtgatttctatgtacagttcagtactggtggaaccccattcctccaatgtggaacatctgtactgatcatagaaaagaggaggtcttttcttcctgttgtatggtctccataggacctacttaactttcagaatctcctccaaatgatagactatggcatatggagtgtgagtctaagtagggattaattggtattttgctacagtatatagtcttccctttacaaagaccatttcttacatggccttgggatgctcactcaaaggagacccagttcacggccttgggatttgttattgatggatgatgtaggacagctgccaggtgtcgtccttcttgacagagaggagcaggagcatcacctgcagcattccagcatgctgtttgttctcaaatgatgatgtaggaagagaggacatacctctggcaatgctggccactcccccatatgacacagatatgatagaagtgttgttggtgtggcagtattgtattccgtgtgggctcagcagacattggaggttcgtttgttcgcctttactgagagctctgcaagagttcattttgtgtatgagcatgcacattggactgaaaagggaatggaaaacaacctgcaaggcacctctgagaacatcagcccccagatgaagaagtctgttctgtaaaccgggagctggagactgttgctcgttgtgtgagctctttctctacttataaaatgacaaccaatcctctaatcctggtttctggaatgaactgtcattttgtccatctgtgccctgcccctaccccactcccaatgaggccaccaataatagtgcttccccaagactttactttttcgtgtctggtcatatcagtgagtttcactgtgaagcttccccccccccccccagtgcctgcatgagtgcatgcattttgtcttataccctatgatactctaataaccccgagatcccacatgttaaaaaaaaaagcataagatatgaagcaagttaaagatagtgagatttgtatggaaaatcaattctgtccttagttatgcatgacagataggagataaaaattgctgaaaattccacattttagcaacttaggcaagttgtgatttttctaaatgtaataaaactctgagaagccaccttcctcataacgtttggcaagaagtcagccatctacagatcacacattggggacccattttctacagggttccgtgaaatattcaggagcctcagatctaaatggtggccttagtttgagagaatgaagatttaggaccttggaaaggaacacacaatgtgcaaaggcacttgagctgtgggaaggagggggctcagcaggtataactacaggaatgcggagaatggagatgcaggttattgtgggtggtttgtatggaagagatcctggctgcatgaagcgtaggcagcggatagctgtagaggtaaggagagaaagccccagaaagcatctgaacgaatgacaaggtgcagtggggccgaatgcttggagaatgttacgctgacatcatcagagagtaaaggcagatgtggctgtgggcaaatggaccaggctggatacgccacttcctgtcaactagaaagaatgaagcatgcagcaaaaggaaaagaaggagcccccacgttctggttgccaaatatagtagaagtttgatgtcagctattatgggagagaagtacaagttgttccccttaaactcctgacttttactgtgcttgtatcccatggttgaactctttcttcttgagggttccatgggcagggaaaagtagattatccatacaactaagtcctctatccagtaggggaaatttgcagtggtcaagcatccatgttaatgagacagactatgaatgagaatacagtaccctcttgatgactatgtagtctacactaggtcctggagcggtctttcaacatctaatatggtcatttaagggaagatctttttttttgggaaaaaaaaaaaatctgaatacctctcagatttctatgagatttaagaagccaaagccaagacccaactatccttcagacacagagaacaatccccagggtgcttggtagatttggcaagggatgatgctgttggtactggtgtgggttaaccagcttttagtgcaaaaagtgctgcgttctgtgagcttctttcttgatagtatatgggcccggaagttaaacgtaggcacctactacatattgaccgcctaagtgggaccgtctatctgaatagctatccctttagacctgggagtgggagtattagaatctagcccttttcctgtccattgtaatgcagttgttgtttccctctctccaattctgtttggagtttgccacagcactcaagatttggtagtttgcttgcctgctaacatgcttgaagatgaaactaccaaaaaaaaaaaaaaaaaaaaaaacctttcaaatggtgtctctgagccttgagggactgcttttaaccctttggaacattagggtttcataggtgatcttgtggttgtgatctcttagacacattcagtgtctctccagggccccacaggttcgttccggttctcatgcccttatgtgcacttccgaaggccataaagtcctgaagactaaaaacatttccgttgctgtgttggaaactttcgagagcaaaagtcagcaaacagtcaccagcttgcatttctatgtaatgaagctgcagagatcatgtttgtctgtggtccctgccccagcctccactggagatgttctgtgataacagagccaaaaggagcaaaaggcattctgtatttatttgtccctctcggcttcccgtaaaggctaactttaagggattctattctgctaagactgctgtcacaaagcatcagggctgggtgcctacccaaagacacttagtgcctgactgtcctggaagccacctgtcaggagatatgtgcaggactctgtcatgactccttccttgctttctgactgaggtgacagtcagcagcactttgtgttcttggcatgtagatgcagcctccccctgataggaccgccttctgtgtctccccctctgtccatgccagtttctcccttccataaagacgaggtcgcattggtcacaagtaaaagtaagccacgcttctggccaggatgactcttccccaccttaattaaaggagtctttccactcgagttagttaatgagggctgaattccctaagcacctctgccatttggagtaagccttctttaggggggagtcgtcttcttctccttctccttctcctcctcctcctcctcctcctcctcctcctcctctttctcctccttctccttctttgatttatttatttttatgtatgtgagtacactgtagttgtacagatgactgtgagccttcatgtggttgttggggattgaatttttagaacctctgctcgctctggttgacgccactcgctctggtcaactctgcttgcagtttatttatttattatttacataagtacactgtagctgatttcagacacatcagaagagggcattggatcccattacagatggttgtgagccaccatgtggttgctgggatttgaactcaggaccttcggaagagcagtcagtgctctaacctgccgagccatctcaccagcccaactccagtatcttctggctgcccagcatattgtctctctcaaccaggagcacacagttgagggttaacttgggacctcccgtgcaagattgaaagagaacaactcacttgcaaatctttttccatacttgattttaggacagttctgtctttctctctgtctcattgtcactttattaatcagggacggacagggctactttataaaagcagtgtataataaaccaaccagagtgtacccttggacttttgtctaaggaagtcctacttgatatgattttttttctctaatcaggcaggaagcagatgagcagatctgatattcccaccaaactcctataagaataatccaacggaaaaaaaattttttttcatcttgtttcctttaggactgagatcttggaggactcttactgttgcttaactgttcttgctttacattgatttctctctgtgtgtgtgtgtgtgtgtgtgtgtgtgtataaaatctaggcaggccctgacttgcctgtactagacatgcttccctcccatccccaccctatggagataaacaccaagtggtgataatagctggtgaattataattacaggtactccctgtaggttgccctactagtgaccctagtaaatgtgtataacatcaggtgaccaagagaaggccacccaaaggcagagtcctcagtctccactagagattgaggtgtcttttccttaacctcccatcctccacacacagcccaataagctctttgtaccggaacctgcagaagcaagagggaaagaggaggccatgatggttgtcagaagtgcatcctataaggtgttctgaattgaaagatttagggttgaggtctagaaggctgtaagttaatcagctctcttggtcagcgattctcaacctggggtctcaaccactttgttgtgggggtgggggtcacatatcagatgtgtgcattacaattcataacagcataactagagttatgaagtagtaataaaataattctctggttgggggtgtcagcacagcatgaggaactggattaaaggatggcaggattgggaaggctgagcaccactgctctaggtgagacttgtggctgcccagtgttgagagttccttgtgttgggagtttctggtcaaccagacttcctcagtcacttctgctgctggtagttccgaatttctccttcggatcttcatagtgcatgtgcagtagaggacaggtgtgcatccgcatctcctgtgagcagcctcgggaacggatggcttcccagggaaatcgctagtgaagccttcctcttgtctgaagtagatgctttccagaaggactcatggttcgagacaggatgagaggatttcatccatggaacatctgatctcaccgatatcttaattttcatattctctgtgatacaagatttcttacgtgacgactttgcgtgtctgtaatacagtttgccttctctttcctagcttatcaaaatcagcaaacttactattttagagtaaaagatattgctctaatagaaaattgtactagttttcaaagaactgcttggaagtagttaagttagcatttaagaataaaaggaattgttaggagcctagcctgggcttctctagctaacaggggactgcggggaaagaacatggctgtcctctctgatgggaggtcgcgtgtgatacctaccacctttccgttgcaggacagcttctgtagcattcactgctggttcctcggttcctcagcagcccttgaggagcaaccacagggagggcattttatctttgcagaaccctttctgttctctgcaacccatctcttttttgtatctccgagtggatcatttctgcatctcgcttatatgaggccgtaggtttgtccaacctctataaaaacctctcaggatgccctcatgttgtttgtgagtatgcagactccagggttttatctttataatcctatcctttccccggcctgtctaatcagtttggaagttttacattttctctcacaggttaacagatgttaattgctcacacccttaagtttgtgtgaaaatactgcttttgctgtctttgacagagtagattttttagaacccctaaagagataatggaggcaatctaggtgttgatgtggtgattaaacagaagcattagacccacggagaggtgctgtctgatgatgaagcctgctgcaccgatatttaacatagacatgaagacactgggcctgtgacttgacacattggcatactgtctttcagggtttctattcctgcacaaacatcatgaccaagaagcagttggtgaggaaagggttttttcagcttacaccttccacactgctgttcatcaccaaggaagtcaggactggaactcaagcaggtctgaaagcaggagctgatgcagaggccatggagggatgttccttactggctggcttcccctggcttgctcagcctgctctcttatagaacccaagactgccagcccagagatggcaccacccacaaagggcctttcccccttgatcactaattgagaaaataccccacagctggatctcatggaggcatttccccaactgaagctccttcctctgtgataactccagcctgtgtcaagttgacactaaactagcagtacacatacctttcctaaaggttctttccgacttgagggggggggcgggggatgtcattgttgtttgagttttgagatgggatcactgtatgtagcccaagctgtcctgaaacttactatatagagcatgctggtctttaccatcctagtgctggcattaaagctatggaccagcatgaccactttaatggtagaaatgccttattcttttgatacacacattgtgtacttctctctctctctctctctctctctctctctctctctctctgtgtgtgtgtgtgtgtgtgtgtgtgtaggtttcagggagatgatctcctcttaggttagaggagaccatcagatcaggggatctgagctctctccagctccccatatttggtggggttttgttgttattgttgtttagatttatttgtttgttttatgtatgcgagtacactgttgctgtcttcagacgcaccagaagagggcatcaaatcccattacagatggttgtgagccaccatgtggttgctgggaattgaactcaggacctctggaagagcagtcagtgctcttaaccgccgagccatctctccagccccgacacatcgtgtttttaagttttctagttgctgccatttaggtaaaggaaccacatgcagattgaccacgtgtttgcattctaaataagtgacacattgaagtcacttagaaaatagtgcagcaggacagcaccctttatggagttggatatgttccgagagcagttttgtttgcccttgcagtgctgatgatagagagcatttccatcttgaagcaaagcataagtgattgtcagccttgtactggaataattctaatggccatatacagtattttgtgaatgcatgtttgtgtagcacatggcatatagttttacatgtgtttatttgcactgcctatagttgtctctagcttattttatttctgttttttttggggggggatttgttttgtttgttttaaagatctatttatattttacttccatctgtgtctgtgcatcatgtatgagcattgcccccagaaggcagaagagggcatccagtcctctggaactggaattacagatggttgtgagcatgctagaaaaagtgaacccaggtcttctacaggagcaaccaatgcccttaactgctgaacacggtccagcgccttaagcctgtttttaatcttcggctttcgtagttggctcttcagggatgcatggcacactcagatgtacactgagcaaaatgtgctctgggaggtagaatgaagaatctggcctcacatgtcttttcttcttctcgttcatgaagtagtcatgctagagtcgtggtttgttgttgttggttgttttttaattgtgaggattagtgatagtgtgtgcctgtgcacaaccatacacatgtgtatatgtgtttaaaactgtttataacttttctctgaatgtcaggtcttcacttacaaactcagtgtgtgtgtgtgtgtgtgtgtgtgtgtgtgtgtgtatggacatggatatgtgtgtgcttgtatgttgatatcttgcttactctgggttctcccagggagggcacagcatctgctcctgcttacccctggctcacttcctccaccttcgtgcccaccacaggccttttgcacacactgagtactcagtgtctatttggaataatttccaaaactagctaagttcttgtctcttcttgtggcctcatgatcagttatcactttatctccttccatgttttaaaaaacatacttaacagaaagaaagagagagaaagaaaggaaagggagggagaaaagggagggagggagggagagaaagagagaaagaaacacagagagagagaaacagagagagaaacaaagaaagaagagattctacatataggagaatttctaatagaacaggtactagaagaagcggctgcatgcccctgctgtcttggacaactgtttgcatattccagaacacacacgtgcaactttctctctcagctgctttcctggacagtgttgatcttgcagaggctaaggggatattgagcaagtttccccccttaacaaacactcctaacactgatattctcaagagtcacctcaatggccatgtgtgcagaggcctctggctctcaggaattcctttgacccaggtctgggacctcaactgtaggtggtaatgttggttgtagggagaggggcagtcacagccagagatttcaagaccaggaataagaaggttcttgaataaatcattgcttgctcctgataacaaaatcataactgaggttactgaggatattttgaaggcagcttcaccgtttatgcctaggacataaagttttaatgcccctttatatatgcctagggacaatagggaatgaatttgactgtaacctaacccattctcctcatatctgttaaaaccctgtgtaagaaagagtgttggcactgccaggattggtggaaagtggcacattgcagtgtatgcttcttgcctgtcagttcagtcctaaggactggcagagtgtgtgctccattctttaaaagtccctcatggtcatgtgttgaaggctgttctctaggtttgaaagaaatgtgagggttgcttgggttagtgaggtccctggtcactggagtgtatcttaactgaatcatatgtgcagctgtcatgttcatgacctttttggtacttgtaaaacctgacccttgctcacaactggaaatttagagaaagaaaaaaaccccaagaacacaaagaaagaaagaaagaaagaaagaaagaaagaaagaaagaaagaaagaaagaaagaaagaaagaaagaaatctaggtggtattcctaatcctgaatgttatagcatgttttctctcattttaaaatatctctgagatgtggttttaattacctacaatatcctggtttcatggttataacattatttaatcactttcctaattgggaagagtgtgcttctattttttttttttttcatatgaagctgtcttgagcctctggacatagattttctgatctctcagtgcctctgggatcagtcaccagcattatagctgagtcaaaggctgtcaactcttggaatgcttttgggactttgtccatctcctgctccagaaaactggcggcagtaatttgtctttctggtagcagaggcttaaatggtttctatctaaactgtgttaggttatttttaagcttacgtgatttgttataaaaaacttcagtcagtatctttgcatgcgtttgtacattttatttatttattgtcacactttctaggtatttccccccgctctggagttctttgtaagtgttatttctttattgaggatttaaataagtatacaactctgatggtagacgtggggaagaacaaagagggggcttttcagtgactagaatgggtgagacatagtatgccaggtagtcaaaataaacatgatgtgtggcaccatgtagtgtgctgtagccattagcccggtgtgttttggtaatggggaacaaagtctgacccttcttatcgccatcccctgtggcccccagagccttcctatctcaaaggagaatgataacttccttcaatatggaccattttcagggttctgaagattaaccattgtgggaaagaccccttcatagctggcaggcaaggtagtgacttggcagcctatcttcttcaacctggatgtcatttgccttgaacgtacggcacaataaaggcagcccctgcctgccctgccactcattgcgccggccactggaaaaaaaaaatgtggttctcagtaagaattatttattctgataaaaatgagttgagtagcaggtgggaaagaatgcagctcgctgtgactaagtggagctggtcaggtattacaccaccgcagtgtgtcgtgactgaatgtccttgttcacagtgtcccggaaggttgggcagcagggtaaacccagacagggcaacactcaactctccccgagaagtgatctcatctacaggatctttgcctctcatgatggaaagtgagactgagaccccaagaaagatttacatctcctaattatttaaatccagttgaagtcagtgcagctccaaaggtcctctactccgtgtcaccaacacgtgggcacaagagctggtctcttagcgcagaggcccacaattctcagccctgccctccatgtttgagcatgggagagatgaccattgggaagcccttctttaggaagtttcacaaaatcaaaatggaccatgagcaaagttttcggtgtgcctccttgtgagaaaacaggaatactttccttggcacctggaggctctgtttaccacttcaacctcctccctctctgctcctcactgattttttttgtagctcctcgtgtgtcttaggtctgtaaggtaaagcgatttcacccttctgatgtttgcctgaaatgtcttctttggtacacagatgtgtgtacattgtgcttgtaagcaaatggctttgagccactcaagcgttctcctcttggctttgtatattctctgtaaagtaaggaagcacctaacatccttctacttagtacacattttgtcattttcccaaagtagacatttggttttagggaccggtgtgaaatttcaggtgtcttaaaattgcactagatcattgatatattctggagagagtcctggctttccttatttgacagtccccaacaaacctaccacaaatgcatccctgtggacgtggagcagagaggttgccccagtagcgaggactcacatattccaggctgaccttgaacttgctatgcaatcaagggtgctcttcccttcctgctcttgagtggggctacccaagccttctaccagctgagctcttcatcctcactttcattccttctcctagtccttgacacctctgctgagaccattctcactccagatggtgaagcctcccacggcctccagcttcctgtcttaggaagaacagatgtgtgttaagcaacctcagggaaggtggtgatgaggctgcacgtgttcattggacacttcctcaagtcaaccacatttctcgtgtcattcttccccaacagcttccttataaagtactggtgtggtgcctattgcctgcatagtaagattatggtacagagaggttaattatgtgtgtccttcaaggttaaacagcagcaatagggagttaagctctgggaagggtggctgcctccttacagtgtccgtctgggttgtctattgaccctgagctcctcagatcgcagcagagccaggcctttaaacatctagatttcctgctcaaacccatcaccaggctttacctccaatccttctgcctggaaccctttcactctagtcttggcctctgttccttcagattcccctctggcatggaatgtacccagctaagtacatttatggttatctcctgagatattcaatcactgagctctaaggtgaaactaggctcccagattctaagtggccctggcttatgtgaggtcaaagacaagaatctgggttcctggccaacttttgtcatagttatcattttatttctctttgctccaagcaggtggagcagagccagggcttatctcatttggaatgtcatatgcatatattaaatagggtgtggtttgaggcccagtaccaatgtggtgcctccttggaagggctaaaaggaagaaggctatggtttgccttttgtccacaaaataggaagcttgccaggagggagggacatcgaactagataagcctactttgtttcgaagatttgcagaacatactcctcgtccagttcacaggggcctgcagagcttgaacttcttacagagttctatgaacgttagccctgagctgtactaagtaccagacaccagaggagcagtaactagaagccaaggatgggttgttttgaataagatgcctagcccgagcatcttacccaggtgcctgtgggtatgaataacgaggaagtgtgggatagctatcgagctgtggttggcacaccctgttcaaaccctttgtggcaagtcagcatcacctcagtcaacaatcagcacaagtgggaagtagaaagaaacaaccagagaagcccccagttgcctcctaagagagtaaggaaaagaagcgccatttacagcagctgtcatatcgggggcatgtgtactcttgggcactgtgctggccattactggtgctcagcagtgttgatctgtgatcgctagataaccctgtgagttagggactgttgtctcacctcattcacgagtagcccgaaggtgagtgtggttaagcccccgcataatgggaaggggtacagcagagccctgtacactagtaactgctctccgtagctttacacttgcaccacacagacctttagccagctccagccccttggcctctggctgaaggctcttaaggttgaattatgcaccaggaagtttcttggtcaatatttcatagggtctgttagaccttgagcactccaggcagtacgtgtgcaggcgtacctttctcgtcacagttggaagacattgtcccgtggtcagagacctcacccaccaactccagccatgtgtgtcacttgtacagtattcaggggatacaaaaacggaggcgaataaatcacaagtggaagaatgtggatgttctattaaggtgaggcttagctactctttgaagttagttacatagtagccagcaattgcaatagcagctctaagtctaaaaacataaggcggtgtataggtactttgtgtaatgtggggttatgtgtatgggtttacactctcttatactctataccaggagtgtgttcttgagactgaaatcaggtattgagagcttttcaagcaatagattggtggctagaaaagaaaggaaacaaatgaactctagtgctggttaatgcacttttcaaataccacttagaacacttagttttccaaatgcaaatcagttgcctctgcatcagggaatttttctagaaatgttaattctggggttctctcctcaggttatctgagttttgcttaacccagcaatctgccttttagccactctctcttctccgagattctggtagactaaggcctgaacaatgaccaaaaaggccaactctgtcatgtcccagaccagagaccgccaaggggaaggtcctcttgagccttgtgcatgcagtagatgctgggtcttggtggctgtttttctgtttgtttccgaagtgcactggtaaaaagtgaacttgtctagtcaaatactcctcccccgaggcaagccttctgttttatgaacaaagggaaggctgatgtatatcttttttctgtatactaaaaatttacagacctttgattttgggtggatttggagtggggatgtatgggttggtgggtgggtttatggatgcagttatcctctacaggtgtgtatagagaccagacattggttatcttcctcaattgcttttgacatttgttattactactgccatgattattatttggttagactgactggccagtgagctgagagcggccagtccctgccaccccgacatgcatctacactcagctcttacatgggtgctagggatctgaactcaggtcctcatgtttgcacgacaagctcgtcacccacggagtcccctcccagccctgtgctgtgtgttgtgtgctgactatcctgtgactgccagtctcttatgaagggttcctgacctaaacttagcattgaaaataacaagtaggagctactatactcaggatcttgaagtatttcctgtagtctttgcgaatactccagaagtggttaccattgttgggatggtccctgaaggctaactctctccatggtgtgttgggagtggtttctaagacaggctctctctctatcctcaagcctcaaacttctacccagaaattccaaggtttcgttagcgcaacaccctgggctggcacaatagaaactggcacaatagagtgatagaaagaaatgatcaggtatagataattaaacaaataaaaactggaagggtaaattcataagagagctttgtgttttcctagtcctcaagagtaacacatgggaacaggttatttttttctacgagtgtgtgtgtgtgtgtggggggggggatgcataaagaggtcagaagataacaggaaagatagcagtcagctttctccttccacctttatgtgggtaccagggattggactcaggccatcagactagcactggtacctttctgatgagccatctgactgttccctcccccattttttttttttaatttaatgaaaacttgaatagtttagagcatttggcttagcagaatcagtgcatcggagtgtatcggcactatcagtagacagtctacactgggtacacttctcagtacatgtcttgctaagaagatgcctgctgcccaagttaaagactgtgtagtatgtcaggaaacttgaaatctaatctagacttttctcaagtctctatctttgggtgaccaccgaattttctaggcttcaacgttgacttctgaagtgtttgctcatttgatctggtatggtttaggggagtagttgttgttttatatccactagaagaaaagtgtttttccccaggcggtagaaatgagactgggattgggcagtaaacttatgttttcttgataggtttttatttgtgggaacaaatttcccgtgtcacttcatgaaagtgatgtcaatgttaggtgttggaaaaaatcacccttaaagttagaacactggtttctttgtgttgtttcgtttgggctctgtttgacaagaacatctattaatatctgctgattagtttatggacataaatatgagctagggtgttaactggtgtttgcatcttaattccatgttgctgtttttgttggcttgtttatttctaatgaataaaaaagtatagcgccattaaatgtgagctctttccttgcagcgacccatacgtgaagctgtccttgtatgtagctgatgagaatagagaacttgctctggttcaaaccaagacaattaaaaaggtaggttggccaactttttatgaatttcatctaagttataatttaacattttgtacttttgctttgtagcaggtttgtgttttaaggataagatagcaatatttttttaagtgtcccttaagtattatatctgaacatcacccatagtccaaaaccttctcatgttttatttgagttatctgtataaagttttttccccttataacacatataatcaaacaaataaatcattctggttaatgcaatattttttataagaaacacgtaagctgtaatttaaagtttatttaatgaaatggattgtggaattagcaggcaaaagagaaatggattgatttgaaataacttatggaaggaagcaaaatgcttagttatgggaaagtaataaatgtattaataataaagatatatatgtatgtgtatatatatgtgtgtgtatatatatatatatgtgtgtgtgtgtgtgtgtgtgtgtgtgtgtgtgtgtcttttcctgttggtgtgtgtcgcacatgttcatgtggagggaaaaataaacatagatgtgtggaggcctgagataaaaatatatatatatgtgtgtgtgtgtgtgtgtgtgtgtgtgtgtgtgtgtttgtgtgtgtgtgtcttttcctgttggtgtgtgtcgcacatgttcatgtggagggaaaaataaacatggatgtgtggaggcctgagataaaaattagatgacttccttaaccattctttccctatttttgagagagggtctgttgctaaatgcagttctcactggcttggtgtagatggacaggctaacaagcactggatctgtctctgtatccatgcagggatggcaggtgctatgcattgctccacccattgctccacccactgtctacatgggtgctgggacagcaaccgttttttactgactgagccatctcagccctataaaaataatgtctaaatccactcaccccgatgcttttgtttacctatataaaatgcagggatgttttcttggggatgggaggcggctatgtgaaagctgtatgttttctaccaagaatactatatttgtgttagggtttgtttgtgagttactattatcccccaacacacacacacacacacacacacacacacacacacacacacacacacagacgcgcactgtttctctgagtctgttagatagtctcaccactttgccaaaatgtatcctgattccgtgattgctttaaacatattgcatccttcctgctgctatggagacacttcagatctctggcagagtggggtcattctgtacaggaaacagtactgtggtgtccttcacctgacattgagacgagcagtaaaatctgttttcaaacagacgccagtgcacagattagtgggaggctgcctaggagaacggaggccattgttcccagtgttaggcgctggtatttgttctgttcccagtgaagctggggcacctagttggaacagcagtcagggggcctagtcccctgctggactagagccaaggacacatgccaatgacgagggtattgcaatgtctttcatttggagtggcagccctgtttctccctccgttcgccagctggagggagtgtctccatccctgcagccagcctcctggttagtatttgctgtgctgtcttgtgccgtgttgtactgttctgtgtcgtgctttcgggtcagctaaggcttcctctacctgggtccctgctccattggctttgtggtctctttttgtcctttgcctgcctggcaacacctcctacttcatcccatgtacctgtcttccaggtcaggaggggaacattcacgcatacacacacacacacacacacacacacacacacacacacacagccaattccatctcatttctattcatgccccaaagtgtggtcattaagggagggttttttttttttttttttttttttttttttgaaaagtaggggtggggggaaagtgggatcttgctggttttttttttaaaccaatgcaaattgatcattgttggtgttgttttgcatgtgtagtgttctgtgtttgtttgtttgtttgtgtgttttctttattttttctttcctctgctaaaaggcaaatgtgtcgatgacatgttttttttttttttcggtttcagaattttacaggtcatttttacaggttgtgtttctctgacttttatgcctatatgtgtgtgtgtgtgagtgtgtgtgctcacatgcatgcgcatgcacatgcgtgttccctcataaaaaagtgctttatattagtttggaaagacattttgttcaggccaagcatcaaaatatcattgctgtgttcttgtgagatgtatatttaaatagattgataaaatatgaatcagacatggagaagatcaaaggatatttttaaataagtttttttttttctgagaaaaagaaaaaaatacaagttccctttggttataatctccctcccccccccccccgtgtgtgtgtgtgtgtaatgtgtggtgtgttaaaatcttatcagtattgttctttataaaatatttttcaaatgtcaacgttgatgtaagtaaggagcgctttcagccattccaagtttagcacagccttgtagcaaggaaaggggagtcagcaaagtttacttccttcttgacagagtaaatcatctttaatgccatgttctgaagggagtgtttgtttctatagctcctttgtcagtatgtccagcatctttccttcgggtgagctcattcatggtttatggtttcatagtcatgagtcgtcagccttataacttctgaccctccacgtgcgtcctgggtttatagaataggctcaataattgactaaaggttgctttcattgccattttgaaagtcggttttatgaagaaaatgtttgtgcaagtgtgaagagcctgtattatattagcaactgtcagtgccaacacagctgaagattcacaaaataatctctcttccagacgctgaacccaaagtggaatgaagagttttattttagggtaagtttttcttctctttcgtaatgattgttattgatctctagattggtattgagatatcaaaaaagacccctggaaagaaaactagttagcattttaagtaagagatttcccttaagacagagaatgtttgggcaggtagcctctgagtgtgtcccaaattttgaagatctgtggaggtttcatttggagctatataggagagataaaaaaggttgtcaaaataacgcacgtgttattttttttcaactcaaacttttccttaaaaataagattgaaataagtctggttaattttagtaatgggattgttttgtttgaaaaaaaaaatggaatttgaagaaaaaggcaaggagcaagtgcagtttaaggcaacagttgaatttctctgtgatatggattatggtctgctcatccactgtaggaagatgattaaaaggaggcattgcacagtgccagtgatgaggtcagggctggttcagtggtagaggactacttgcctctcacgccggacaccctgggtttgatgctcagccctgcctccccacaaaagacagaaaaattaccagttatgttctggttagaagggaacggtttctaattcagagatctaatgcatacaacgacttttaataccactgaataggggagcatttcctcagcccccggcaccccctgttcagagcagctggatacagaagggcattctctgaactagtggagactggtgcttactggtgtttgctcgaagatattaggacacattaaggcctcgaccatttacttgggaaagagaaggcctttcctatttcaaaatgaaagcccgagttgtctatacactctgctattaaacacctccaaactgctccagctttggccttctagtgccgccaggcccagggcgcaagaccctggcttcttcctctcagccgtgctaggatatttttttgcactgcgaatttggataacttgaccggcatctgttttctattatgttcagagctgaaatgtggctctgaggttttaacacttggtagatcccatgcccagcctctaccagatatattctagataactctgtgaaggaccaaaatgctgtcggaggtcgagaagggtctgttactggctcttagctaactctcagatacagcaagcaaccttctcgtgaaaactccagacagtttgtactcctcctatttgaaccacattgtctaaattttagtagatataaaactgtttcagtgaatcataccggtgggcatatttttgttttttatttaagatctttattctattccttccacaatttcgtattgaatgcctgttatgcgcctgttcctgctagagactatttattgctgtattcctgatgagtgtggggccctttgcagacttgatgaacagacaaccatccttctgcttgttctgttgctaagcagatgtggacccagggccaagagctcaagttgggctcccaagctcaatataatgccgttccatgttccattaggaaggagcccaagcctagcattagacccaagtcccatgtctgtcctgaccactcacagcctctgaaaacaccaagcattcactctcctggatcccttttccccaaagaaagagaggtgtagtcttttcttccctgattgacaggcagggatgcaaacatcagtacctggtgccatgtctgggaaggttggtaactagtcaacggcacctgagtctacttgatgaaacatgggattttttgggtgagtttggagaaagagaaagaagcaaacagaagcagcctcggggtgtgactttaccttgacccagggcaagttctgattgctcagtatactgactcgtgggttcctgggcaaattgcttcaagcccctggttccagtgatttctggtgtgaaaatgaattggtagttacacattgttgggttgttgggagaattaaatgaggccatatagtgttagtgcttcaggaaattatagttgtaggcgggacattaccatagctgagcataggacctttacctataagggtacctctgtagaagacataagaagtccttatagactgttgagaatcactcttcaagagaccatgatacacgtattgtctttttctggtttgcccagatattagggtagaataacagcatacaagtcagttattgatatacagtagattcctgtgtgctaggagtcattcttaattattcctgtctcttatttcaattttaaaattatacctgttgatttttgaattatcgtttctgttccttttaggtaaatccatctaatcacaggctcctatttgaagtatttgacgagaacagattggtaagtccttggttttgagttttatttctttaaaactgggtttttcgaaccatgcctttcagatcttctgggtcacccgcagtgcgcatgcctccaagaagactgcttttgtttcactgttaaagttctcagttccagcaaatatttgtgtgttgctaggtcagaaaattgatttgagtatgtgtgtatttcttttatagttaatactaataaaagtcacctatgacgacctcaccccagatgctttgtttggggaatatggataggcgtgtgcatctgtaaacgaagccatcaatcttataaacaaaatgtttcaaaatgttcctcagacatataataccacagcaaattcaccgacaactctatggtgatggtctctggggaaacaaaaatctaattaccagttagtttataattaaagcaagtctcctcagcaggtgaaatcaagccagaggtactttctcaagaaaaatctttagaaaggaatttgagaggactagcataagggctataggtatggctccatggtaaaggacttgcctgtcgtgtgggggaggtgtggctcagtggtagaggacttgcctggtgtgtgtgaagtcccgttcccactaccgtaaaaacaacatatccatacatgaaggaaaacccaccaaaaccaaaataagaactctcaaagacgaacttgaagaagagctgatataactagcattttatatataggctgtgtgtgtatgtatgtttgcatatgtgtgtgtatgacatagaatatacagtgcatatgtgataatcaagacagctctttggagtgagttctctcgttccacttttacatgagttccagggacacaggtggctgactggttttgcatgacgagctcctctatctgtggaaacatttggctggcccagtgttttgttttcctaagtaacttgagtgtttacatcaaattctcatgagccaagtgtcccagctatgaaaaggaacatgatcatgttatatgtcagtcgttcaagcactctcagaagtaggaatacaattccgggcgcgtgattgattccactcctacttactgtcctgcctaaaaggaaggtgcatttgtgagctcgtccttctgcagaattcgatagaaactcagcaaactgtaaaatagcttgaagttgacacagtgtatccataagaagatccctgagacaaagttatgcattccctattactaggaatgcaggaactctggttccaagggtgactgtggcgaaaggccagcgaggggatacacagggtcagacgccttgtcttgttagtgtcagcctatgcgggggaatagcctgactttctactcttgataaaggatttgggggtggatgtaatctgatgtatgtggctttcgtcttgcaaatggagcactagcggattgaaccttgactcccagcatctttcctgttataaatatgggattgtggtggcttctttgaaatgaagtgtgtcttgggagagtgatcattagaggtgaggactaactctcctgtgagttgcacagtgtagcttccagcccctcacacccctccagcgaggcccggccagtgaatgaaatagcagcattcattgaaataatgtaagcagtctctgcaagaatggggccttcacacactggtacttaccctccaagaaagtcattttttaaatgaaacagtggtcaaacttgaagactctctatgttcttctgctagagaaatgtactgtttaaaagtgtcagatttcccattgtgtgtgatctaaaataatgactgcagtcgagcgaccttgccatgggtaggaaaccatgtttccaaaccaaaagggggctttgaatgcagagcgattaaaaaacccgatgagcagttgtgttttatgtgttcatgtcatgccttgccccgggctgtctgctgtgtggttaccatccacagaatgtcaatggtgctggcggtggcttttttgctttgttgtctgctaatccagcaaagacaatacgtgacctgagtctatctacttggaagttctggcactgagcagatgagagtctaggtttcacagaggttattttttgccattcaaaactctgagcttttagaaaacaagtttgggtgtgtgtaaacactggcttaatccgccacaccctctgctccagagctgttgacagaaacgagctttgtagattttaaagtacgttttttgtcactctttgcagcctggcattttccccttttatttttttaaagttctgcctaaataaatatctttgttaaggaaccaatgtttctggggcataggaaagagaatatttccaggtttgtgatgaatctgatgacagtttttggggggggcattcacttttagttctcaggtcttttcttgcatgttgcaaacagaaagattctaggtttgtggcccaactgtggtaatcttgatgagttctgcctataaaaagagttccaggcatttcttctgtatgatattcaagttaaattactacaaagcccatatacacactcatcatcatcatttctctctctctctctctctctctctctctctctctctctctctctctctctctctctgtgtgtgtgtgtgtgtgtgtgtgtgtgtgtgtgtgtttgtgtgtgttgtctgtgtgtgcctgtatgtgtcatgcaaatgggattatatgagattgttttcccaggctgggtttcttttctctgttaactgctgtgtctggcaatcatatcataatcacacccctctttaaatgaagaatgtttctagtaagtagcaggaactggaccaggcccacagctggctgtgcagtagtgtgccccctgcgcctccacttggctattttgttacttgtagatcatagtctaataatttcccactaaagggacactaattccacagggtgtgtaatcgtatttatagtacattttattacttagcattccctcgtggtagtgtggtgatatcataacagtaacataacatttgatgcttgagagagttcaccctgcagccaagctgtattttactcattctccgatacggtggggaggtggatgacatagctttgggtacttgtgcctggcatccgctcgctcgaaagggacctgttgctcttggtagctgggaaagcagtgccctatgagtgtgataggtcagatttacagcatggttgctagtgcctgcgctgctgccttagtcagctgccccagctccctgctgggccgcccctttctgacaggactgcagcagctgggaaggtgctgtttcaggctcttgctgttcagagggggggaaaacagcaagagaggggaaacttcactaagtccagaagctggcattggaggggaagcaggcggtcatgtgtctctggccatcctaccctctgtcacagagtagatgagagctttttgctcttacccaatcatgcctggaatgcagctcgccacttgggctatttctgctatctgtcgctcttggtgccgcagtgctaacggtttggcagatgggacactttttcttggagttggtgtctttgggttttgacttctggcagtgccgggcgtgttgttgtcgctcgccctctccctcccggcccccctggtcaccatggcccatcggcttcggtttcattttggctctggtcgcagcaatacggcccctgagtctgagattctagaccaggagagagaagaggactttttcatggcattccagacgctgccacggagaagcagcccgcactccttcacccagagcacaggggaggacagcggcctgcaggagggcgtgggcgctctcaagcgcagctcatccatgttcatcccgcagctcctggcccgggtggacgccaggcccacccgcagctcctctgtgcagatctccctgcagcgaaaggccgcagacggtgccacagacagctgcgggccaccggagggacccgaggacaggtccccaagcacccaggctgacctcggagaccaggccgcagccacaagggtctcggctcagatcagctcatcggagccctctccagtggacactcctggaagctcccctccaagggcagcctgggacccggggaccttggtcaatggcacttgtgatcaccatggtcagtgtccccacctggccgagggtccggaggaggccaccccaggcctgcgcatccaacaccgagcctcaagcgctgacgtgcgccaggtgcggctgctgcctttcggcccagatggccaggctgagcccaggcgctggtccctccagcatgttccagatgcttctgggagctccgggaagcgttgctttgtctttcaactgcagcagccccagcaaggcgctctggggctgactggtgacttcaactttggcttcaccggcactaagggggacaggttggtgagatatccacgcattcgactggaaaggagcacgtcataccctacccagccccgagctggccgggtaagccccactgaagaccgcggaaccccagaagcatcacctcgggccagcagggtggtccccgagatccgcaggacaaattcagagaggaccccgcagagcccggggtgcatgttcaagatcaggcaggatcaaaatgcagggcagcagcatttccgaattcttgtgactcggggaccagaagaagccccccaaaaccaagaggagactcacaagagccctggacaccctggagctggcgctccggtaagtccactgatgcacatgtttgagtggctcagaagggaccaggccaacccagaaagcttggttattttgcagcgcaaacctctgccgagggagtatccctcgctgttgagtcaggggatcccagtgttttggtagcagtcaatgaagctagttagcctttcaggggaaaaaaaaaattcttttccgtaggtcctggacgtcataaagctctgtctgttttggaatctgcagcttaatgcacactctttttagatttccttctggatgaaagaactttaaaaatatatttcttaaaattattctgctataaaaaataagtcagcacctagatgtgctgatgttggtagtgcgtttgaaaccctgcttgcaaacacggttctgacaactgtcagagaaaactcaaaggctgttgggaagactaggcatttgagcctcttcatcaaggccgtacttgattcttctaaagacatcattcgttctcgttataaagtgtatcattgttgggttttgtgccatttggtaattctgatcaagtgtatgtgtgtcactctgaagacagtaggagatgtgtccccgggcgcagattggctatggacaaggtaccacgggaaagctgtggtgggggcacattacacagcagtgtaacttagctcagcccacttgagagttcaagccaaggatgccaagggatggagccgttctccagctgtggaaaccgtccttagagggcattctggctttgttgcatgtggggggtttgctctctcctttctgtgaaatggagtacagagagacagctgtggactgcccagcccgaatgacttgcagctcatgtagtttcagtcagtcaggttgccttgtgctagccttcactcgttgagtgttctctctcgaagaacagcctccaatttttaaatggtctccctccccggaacttcttgtgattggtagtctcagggtatgatcatgaggtccctgtggacctctgtgtttgggtttcagtgtgatatgtctttttaagtaggcagatgagttggtatcttagaatactgtgggcctttattgatttgtgtttggagtgtttctggttagtcgggtaaacttgaacacccccccccatcattcaattttcacccgtgtttaggaatgaacaaccatgaaaggcaaatggagcctttcctgctttgttatgtccattaagtcttatacgtttccttggtccaaacccatacagtttccttgactgtaacacagatctcagtgtgtcttgacagtgtagcagtttgtttaacctaccccaagaaatcactatagaaacagtttcaagctttatcagcaccatcccgtgttcagccaggaacagcccccagtgaggaatgcctttcctcaggttgacgtgactgctgaaaacggaagtcctttgtggtgtttaggtgttgggtacagatacagttacatgactaaactcccagtctagaatctctaaagaaatttttaaaaaaggtgtcctaaaatttcgtggatttttaaggatgtaggtttcaagaactatgtagatcactggtcctcaatgtgtggttcatgacccctttgaggaaggagccatgtatcagatatttacactattgttcataacagtggcaaaattacagttacaaagtagcaatgaaaataattttgtggttgggggtcaccacaacatgaggaacaatgtatgtattctggacacataaaaaattcacatgtggttggcaaactgatgcttttcttttaagcaaaggtctttcccccagaacaaaaaacaaaacaaaacaaaacaaaaacaacaaaataaagtaggcaggcaggaaggaaggaaggaggagagagcagacttggtcttgtaatggaacgatctgtctattcaccagctttgtatgtgtatcatagagaccaagggtgttaggcttggccagcagctgcctgagccttatttatcttgaaggaaaacattcacttaggcgtctacagtctggctgtcactagcctccttcagcggggttcagttagctgctgctttactcttaaggacaggtcatcgttattctcaatgaacaattaagcacaaccgattactcagtctgggtgtgagtgatgtaggaaatcttttgatatggaggtccttttgcacagcatgctcagtgtgcttttaaatgtgcctcccaaacattctaaatctaacgatattaaccagctagattcttagtagaaaatacaggggaaatctgggtgagagtagactccccaaacatcacccataaagcaaatctgttcttaaaggtaacagcaatagacaagaaaatgtctccagggtcttagaattcaccctctccatctgtggcattcttggaagtctcttaatgaattagttaccatcatagattaggtttttcggtataagcttcctggctatatttgagttatcctgagatggttaggctgtctttactcacacacaaacacaaataccctttccacaaataactgtcaagctcttccttctccaagcctactggagccagcttcctagtcccattgatactattaagtgttcaagggcttccatatgtatgctcttaacctttgttacttagaaaggcactaactggggagtttcttaatttcttgctgacacaagggtttgtaagtaaatggagggaggaggaccctggagccaaagcgggaattcccacaagggagtggaggggagaaccttaccttctcctgcaggccttctgagctccagcagtcttcagtagcgcagtagtcttttgtgaatacaggtcaacttcactggacaacaaaggactacgcgaattattttcatctggagagagtttcaggttgagtgtctcccagcaaagcctcttggcttttacagaaaaaaaaatatgttaatagttattaactataaaaatactccaatcaaattttagctctcagtttgttggaaagaaaattatgttgtaatagaaaagggagaaagttgtagtcttttaattgtcttgtgcttttggtttggttttgtttttaacagattttataggttttctgttttatcttttctagtgtattgatctctctccgtgaggtcatgcttgagaataacccagggctatgtgactcactttcactcaaccattttcagcaacgtcttaaaaattgtaaaggcagtacatggggctgatactggctagggtttgtcccccaggtcagctggtacttgaagtgatagcttgtggtatggaacatcataactaagatcattattattatcattattattattattatatcattaacattattatttacttagaaaatatgatatgaaggcatagctatcttactgggcgttgccaaccagtgtgttaatccactgtagatggcatcatgttgataacgttagcattacttgtattctgtagtgcgttatgtgcatatgactgtatactcacacgcacagcatacatgctgagcctaaaggcggttgtaatgttccttgtaatgcaacgttcttgtgaaaaaacgagtgaagcgccatagagctgttagcactgtcctgctggaggtaggaggcagctagggccctcagcaggctttggctctggggcctggggtagttagactcattcttcggcaccatcagcagtgaacatcgtaggctacctgtgagcagtcagtttctgagtaacaggacaacaaatgttgatggcgtatgagggaatgttgactcttccatcatcatgtcttccccaacctcttgtctcccatgtggcccgatgataattccattcttaaaaggaattgagtgaaggacctttggttatattcagtggaggctggggttctttttgtttgttcttaatcttgcaaacgtttttggctgcatgctggctcgctctgatggatttgcgtggtgacactcatactctgcagaggcagagggatctgtgtggtgtttcctcactgtgtgactttaaaatgaaggttgctgctggcaatgcacctcagtagatcctgccctgcctaacagtggttatgatctgggggtgctgctgctctgcttggggaaatattgaggcagacttccctggtctctccagccaatcactgacctcatgatacatataataagtgtactgtcttcataggggctcagaaggccaaaagacttttattcattgagagttattgtaaaaaaaactaggcgtggtggtgcaagcctttaatcccgcattcaggaggcagaggcaagtggatctctgtgagtttaaggaagttccaggacagtcaggggtacacagagaaatcctgactcaaaacaccaaactaaaccaaatcaaacaacaacaacaaaaaagaattatcttttgagtcccatttggttggatattttaatgtagccaacactaatctgaatggccctgctgtttgttcaaactgaagccaacagatagattcttttagttaaagtcattaaatccatgttcttgctggaagggtgtaactaaaagtccctaacttcctatttgcctttcagttcctagttgtgaaacagttgtgataatagcagaaaataaaccccccctcttttagatgctgaatacacagtggaggatctgaattccttcagaaaataccaatagactgccagtcccaatctggacctggctggtggttggtcagacattagcctgtcacagtcttcctgtttctttcttctacaaaagaggtgtagaagcctaccagttgcctggaagaggcagccatacacacccctctttagacacagaaggatggagtcttgaaggagaaatgatgatagtgggcttcttggtttgtgagattgctgaaagtgtttaacaaatacttctctctcaggtctttcaggacacacaatgctgtcacggagttttcttcctaatttacccgatggcgttgctttgactttcttgagccaactgatacccagagagggtttgcttcagggagagctgtggcccagggtgagtgggccagtaagtccctgtgccctggccagtttgaggttgtcttgaatccaagtgactctgggcagcgccgtgtttgaacagggaattagtttggaggctagagggtggagtagatggaattttaaaaagtctgcttcttaaagatggggatctagagctgtagctggttctgatccctgtgagtcaaatgttcccatctctcagccaagggaaccaaagaaaccaaaggatacattaagttagagaaccctgatttcattgatttgatgatcgtggttactctttaaaattgggttacattgtatctctaaggctgggcatgtagcataggatgtgggaggtcccatgttcctcctcaacaaaagtgtgtgtgtgtgtgtgtgtgtgtgtgtnnnnnnnnnnnnnnnnnnnntttcttaagcaccagttcagctgtcctaatttttctaaactagccagtgttttaagtattagtaaagaggatgaaattctaccaggtagcaagagaataaacattcccccccccccccccaggtaaatgtgcatctcagaagtcctaaagttcacactgccagtttttatagaagaccaggagttcagcaactttccggtctctgcaataactgggggcatctgtgtggccaagcgctccattcctggaggctttctgtgctcagggttagtgacgtgtagagatgcttgatgcagctttgtccatctttgagagaagaatagtgatttttcacgctcgagatttaagaagtgaacgcctttaaactgtacctagtgacccatgcatgttgcatttgcccacatccttgactgcccattttcaaagcttcatgatctcactgcttgaggatttcccatgtccctttagaatgtagggccacatatgaacctctagagaggaaaaacaatgctttggtccaaacttttataattaaggtgggtaggtatttaaagtgtatcagaaatattgaaatatgtatattaaaactcgagcctcctctccacctaaatccaaaaattttagaactttttcaaatccagtttttcaggctagatgttacagcccaggactaagatacgtcttgacttccttaaggaattaatctcaggtgggcgggtagaccagcagcaggtgctctgggcttctttgttattctttattaactaaaatggctttgtggcatcatatggccttattcttggttttacattccgttaaagaggcaataagtggcttgcaacctcaaccgttttaatttagtttgaatattttggatgacttaacctcgcactagtaaaatcatgttgcttgactgttggggaatctaaggttggagctaatacgccgcaatggctgatggcgttgttcatggatatggttttcaggtttggctgtttttaacattctaaagttccgtgtcgtgaaacgttggagttcgttgaaatgaagttctgctctgagcagaggccttcctgaggatatgcttgttttctgccttgttggggctgaactagagtgctatgcatgctaagaaggcccctacgctgagccacactgttgtgattctgtgctttctgggtgtttctgtaaagctttccatagttacacggaacgggtgggaggggagtgtgctgtgctgtcgcagtcatagctgggtttgtgtctgggacactgtgggaaatgatgaactctggaaattttcatttctgcttctacctacgtggagtgggtcatttggtagggtgtgtatatatgtgtgattatttattttttttaaatcctggccacaagaatgtcttcctgaaattatagtagtttcagtattctaattcctgctgtcagacaccgatggcctgtgtacagatcgccactaggagctttttctgttaccactttaattgtatttattgtacagtctcacagtagttacccctcctcctctcctcctccgagtccctctatatgccccatccctaacccccccaccgctagcctcatccactcttcctttcattctctttagaatagggccagcctctgtgtgtatcaaccagccatggcagatcaagttgcagtaagactggggacctccttttcttttaaggctggttaaggcaaccctgtaggagaaaagagttccaaagacaggcaatggagtcagagacagcgcttgttcccacggataggaattctacaggaagaccggtctaacaactgttacattagtgctggggaagggcttaggctccctggttggcagttcagtctctgtgagcccctatgggctcagattgattgattctctgggttttcatgtggtatcctaaacccctcttgctccttgatttaaaaacaaacagaaagaaaagaaaagagaagagaaaagaaaagaaaagatgtatattttaaaatcaagtcccccaaagccctattacaatcaaatgaaagcctgttactcaaggtagccagccaatcacgaaaatataactgagacaattcccttccctaagagttttaagacttttgtctgggaagaccactggaatccagcttactgccgcctgccagaaactgtctgtgttgagcagctattttaaacttcatcctccaagttcagagagcatagggctatctttatccctggtgaatggtttattatccctgtgaaaggaggagttgcacacacataagagagatgctgtggtgatatgggggtggggggtagtccttgcccatagtggccttatactcttagagagcttcttatgtccggtatctagttttgacctgctagatactgaccccagaactgcgagaccacagaactcatgtggatgtctctgacccctttgaacccagaaggaggtgtgactaatggacagtttcctctgagattaaaacatcccattctgcagagaagctccttaaacaggaaggtaaacaactcgaaatagcttcaggaagtccccaaaactgatgagattcactaggcccctccctccctgaggaaaaggctgcagagaatcacactcagacaaagccaagctgcaaagaagactcagaccagaccacctgctttgaagagatttagaccaactgagtcagttagaaaagacactcctcaatctattgagctgcctgcaggctgtgcagtgtgctcctggctcccagcttttatgagctgtcacccatgttggagtaggcttgggtgatataactgtctgagtcatttcttgctgcaataaaacccactggtttaccaaattggattttgctggtatccatactctggtctgtcttgggttctctctcaggcatgagtagctgtatatgtagggtctctccagaaagctgtcacccaaccacaagcaacgtgtaaaaagggtacatgcaaagaaaccagtatttcgtcatgaggatgaaagtccatagttgcttaatctacaaagatacctgagtctggggtgagagtaaggtttatagtccttctttggtcaggtactaattgggaatttttttttaaaaaagattgcaatgaatatatgtgcatgcatttttacatcagtgatagaaaatccctcatcacacttttcccacttgccattgaggaccgaagggtcaggctgccaagaggaatccaggcagtgatgtccacgcagttctgcacttgttgtctgtgtcctggtgatagagcagaaaaatcctggatgtttctaagtggtgatgtctatttcagtgcctttgttttgttgggagtattttcgatgccacgggggaaggagttggtcatgttgtcctgactcatgcaaccataatatttatttaaaccttaactgaagcctcttcttctgacaaataagacttttcgtctggtggaacaaatccgtaggactccccagaaggaccctcccgagaccctaagatagataaatgaacttggtagtggatcagatggataagcactcattaagttagtcattaactcaaaactcttctttcaagccaggtaccatcccagatggtgggaccacagcaaggagcagaaccaacccagccttccctcatgccacaccattctgttagcaaggacggggatgagcggtaaagctgctcacccatgacagaccagagggtaaagctcagcataggagatgatggcgagggctacagaaatggaaccaggacagggattacgtgaggcagccttgggggatgtcgaacacatcaagtccatagctgggaggagatacttcagagggacaagtgtgtacaaaggacttaaacgccaagtacacttactgaataaagggaatggcaaggaggggcacaaggtggtgctaagtacacaaggacggcttctagcatcattcctgttgctgtgatgaaagactctggcagaaagcaacttagggaaggaaagtttcatttgacccctcaccccaccaccagttccagtttacaggccatccctgcagggaagtcatggcagcgggagcttaaagcagtcagtcacatcatcacatcggccgacaagagcagagggaaatggatgcgtgtgtgcttagtactcagctcgatagttctagcctgagacaatccagggcccaaacatcggggtcacgtcttcccatgtcaatcaagacagacctacataaatgtgtccatgggcaacttaatctagacagtctccttgagactcttacaagactagattatgtcaagtcaccaaatgaaggtcccctccatagatagtgtccctcaggaaaggagcatggtcatggggtgagcagatcatggaacatatggagatgcaaggccatagaaggaacggctctatgggggtagagatggacacagtggccactctactgagagtgttcaaggcagtaggagctgagagccaagtgggcaggctattgtaagctcatatctccttcaaggatggaaggtcatggtccctgacttacattgttgtcgccaacccttccctcatccccagttactccccagagtgccaaggataatcgtcagttctctgaggaggtcacctcacctcagtatttagcctgccattttcattttgcaacgcttggaaaaatggagagctttcatgctcctccagggagtgttatttcaagatgtcttctgctgcctgtgtcgggccagggtgtgggtggatgtatttttgcagcttctcaccagagagtcggcttctgatttgcagaccgcatttattatgggtcatattgtccattgatgaataatgtgtgggctgcaaagcagatatatagcttttaaaatagatcatttatcctgcaggcttcatcccccagtaccaggcaggctctccagccgcattttctggaagcagagtttggaacgtttccttcacgatctgggtcgtcagttcatcttctggcctgtcatgcatttttccctgatcagctggggacttgagggtgggctcccaagcacagtgtgaatctattggcaaagacatagtccaggcggggtttggggatggtattggaatgcctgctgaggaaatagttgctcctttgagctactgaaaatatttcttataatgaggatttacacaaaaggagaaaatagacatcatggtttctatggaagtcctgtgggtatcatgaagtaaccgaacccagctgatcctcatgaccgcagctgtagaaccaggcctgtatagagaggttctgtgtaggagaagatgatgtgtcttggggggagaggaggaacctcctgctaggtataatggggtttgggagttttcctctagtggtccagggcaccatggggtctggaggtggagtgaagcacagtctcctctctgatgccacccccacccctagtctgtgggtcaaggacctcctgtcacagaaacctccctaagggttgttttccctttacacagagttcttgttttgcctggtgtgttgcaatctgcaggcagtggccaggtgacatctgttggaatgctgatgtgcgctgccaagcaaaacagatgcaggaagatttgccaacgtggggaagaagggacagagtgagcggtcgagggtattgggggcagacggcaataatggccgtatttatagactggaaggctagcttaatgccaccttgctttaaactccttaggaaagctttctaagttcatgccgctgtctgcaagcattcagagaggcttccatttcccaccctgcatccaaaatggtgtttaaatggttcagcacagaaggagggatttcatagcaacatgttgttttctgtaaaccactggccaccagattttttttttttttttgaatctgtgtttttgttattttcgaaacaaggttgaatcaaacccagactggcctggactttgatccatagctgagactggccttgaactcccagccttcccttctctgcctctaatttatcggagttacaggaatgtgccaccatgcctggctacctatgttttatattagtttattgatacgtttgccagtttgctgatttaactcccagtgggctaagatctgctccaaacactgcagatggaattcatagagttttattgatggtgattatccagtaagaaaaatagacttgtggccagaagtggcctcattggccatgaaggagtagagaagtctaatggttacttttcttctccatttgacagtactggacaagaagcaactgaggggaaagggttaactttgataccaacacagcatataggagtgggaggctgctggccacatttcatgcatagtcaggaaccagagagtgaacggcaagagaggccagattatgcaaccccaaagtctgcccctgctggcctgcttcccctgtctagcaaggctctacctacccagacagtatcaccaaagaccaaattttcaaatactggagcccaggagagttttcatattctaactgcagcagagtgttaatacctggggttgcacacaggcaattctgaggtacagtcagggccaagagcagctgggtaagctgatgcagctgacatcctagacctgtttgatgaggaatagccatggatgtgacatgccatctcttcttacctggccttcatcactctcaagtctgcctgccaagtggtgcttgggggcgtgctccgcaaaattaattcaggacacctgggtgacacctttgcattaaggcaacgaggtgttcctgtgaggagtttcaaagtctgcatgatagagcttgtctcccggaatagctcagaagtaaaaggattaatttttcttgtcactttccaactgtaagaaggaggtggaattggggttctaactctagctggggacaggccggtctgtcctgtgagcctgggcacagatgccttttctcccggtagctgcattttctccctactgcaaatattagctgagcacatttttgtggcttttggaatgccacttcttaaaaagaggagggctgttgtcagatttttgacatttctgacggagctgggaagtggtgtcttcttattggaagcagaatctgtaaaggggaaaaagacaaagttcctctggttgctgtttttgaattagatagtatggtcccttgtccaagtgtagctctgcaggtcccaccaaagtttggatctcagggcccctgatgcccaaactaccctcttcctgctgtttggggtttaattgtaccaaatccgggctctcgatcgtctccattgagcgaaccataccgggacagctcggctttcagattgcccaatagctcatgcttacattgctctctgtggtgccatcctaagtagacaggggcttgcatgtcccaggttttgtttctcaaggtgacctttgcaacatataatctggttattcttaaggtcactgagcttatctgttagcaaagcagggaacaagggagatgactcagttggtaaaatgttttagcttgcaaaagctgagaatctgactcgattcgtaatatccatgtgaaaaagctggacatgaagaaaacaacagattctactggtgcccggccagtgagcctaacctgcccagaaagctccagaccagcaaaagatgcacctgaagaaccctggagttgaactctgacctctgcacacgtgtccacctgtgtgggcaaacacacacacacgcgcgcgcgcgcacacacacacacacacacacacacacacacagaaatgttggtggggctaataagaggcacacacttgcttctgttttgacgttctcagagccctatgatctcagagatgtctggagcacatcaccagtcctctgctgagccagggatacttatgcatctctcagagcagtggccctgtgtaatttgctgcttctcggtggctgaggatgtaggaggcggctcactaagcttcggcatgtatcgttgttcatcagagtaagatcataaaggccgggaagaaggatgctaaatagtttttaataaagtgcgtgctgcctgccatcttctgccttccatcgtatctcctttctggctcgctctttgtctgcatccagcatctctataatcacacttttagaagggtggatgtgtgagttcagtaggctcatttgaccctctctatctccagccatggtgagagaataagcccttattaatgcagtgcttaataaccataagcaaatattaactttctgttattgctccctctggaagaggagacaagaattcctcacgggtgtttgaggactgaatttgtcacaagtctatctgctgatggtggtgtcatcagcaaacggatctcaatttatacttttagtcgccacgtaaggaacgccatcctttcagaattaatgacttttctaacatattgtaatggaagagtcctggagtgggaggggaaatcaataaaaaggttttttgggttttgttgttgttgttgttgttctttttttcaaattttatgtctcacttgatgagcaccatcaacaacttttccttttataacttcaggttacaggactttagagatacccaggtttatttacttttgcaaaaggcctcagtgttcttgagcaatggctacctctccttttgatgtatttcttaaaagttgttctacctagtcttcattaaacccaattttaagtcactcttttagaagcatgccagaaaaagaaaaaatagttgtaaaatggttttatttgttattttgaggcaggctcttatgtagcccaggttgatcttggaagccatggtctttttgcctccagctctgagtgccgggattataagcaggcccagtgtatgaagggatgggggtcagccccacggcttcatcatgctgggcaagctctccaccaactgagctacatcctcagcatacaactcatactaagaaacctgaggtcagtatgaattgtggtgattataatctagattgaacagcatcaggggatgggatcccgcctcccacaccagctgtgtgtgtgtttgccttttggtaaacagcagcctgaaagtgtaactgatggaggggtttccccagtcggggttatcaggtttgtctgttggtaatgattatattagaatgtgtttctcttcggtccatgtgatttgccaacctaatgccaactgtggttctctggaatctctgagtttcaggagtctattaataaagaagatggagagaattagttgctaattttgggtgcgcttgaaacgagattgttagcaaattttaccttcagacctacaaccgtggtttgctgtccatcggacatcatccttgggacagaaaataaatacagagactcagggaaaaaaaaagtctgacactttccatatcttatatttcctttatacttgtcagtgttccttaggaacatgtatatttcttttcttcccaggtttgtgttaagatttgacattataaattctaccaaacagagactacaagtctgtactggtcatgaattctttcactaaagagtaaaacctaagtaaatgtttacttctaaacccctatgagtagagagtaagtgttcattgtcactgacagaaggaaattaatacttacttcagcctccacctagcccaacaacaaggaagaaagaataaattgaggccaggacaacatgtgacacgcctgttgtggctaccgggagtcagttcagctaggtgacacttctgaatccgttggacatcctaggctctgggaagtccacagaggtacaagtattaaagaagacagaagggcctgtggtcgttaccagtagcaaagagaccctgatgagtgaaatatctgcccaaggaagtgaacaggagtagagacaggaagttccatggatgtatgtgtgtgtgtggctgtgtatatacatacatcccatgtgtgttcagacaaccaaagagactagaagatggcaacagatcctctagacttaggcagatgtgaactgcccactgtgggtgctgggaactgaattcaggtgatttggaagaacagcaagtgatcttaactgctaagccataccttcccagactccaatgctggctgttttaaaaataggaggcagccagaggaataaggatggcctagacactcccatctctccttctggattttaagttctctctctctctctctctctctctctcatagtgggagacaaccttttgtttccttaacattctgtgctgcgatttctataaggagctgtaagggtccctctacggtctttaggattaaataaaactccttttgtttgtttcctgtggtacattcttagaatagcaatatctctgtgtgtcccaagtggctgtagaaccggtattgtggctatataacaagtcaagcagacgtacttatcattctgtaagccctaattgtaccattctctttcctccgggaaggccttcctggccttccctgtatgctcttgatatagccagaagaccatagttacagattacatctatggcaccttctgaaattcaaaatagaacaatagactaggatgtagctcagtacccattgaagcccttggtcccaaccccatacactgatgaattcatgtaatcctggtatatgagaggtaggggctagagaatgagatgttcagagtcattcttggctacattaaaagttttgagggagcttggggtaccacatgatgctgtcttgtaaggagctgaagacagcatagatgagcaaagacatcacgctttgctcacccttctctatctagaagtggggtgaattctaccgggctaagctgattccatctgttagcttatcctgtaccttctggttcttgccttttcaaatgcttgcttttgtggagccagccactgtggaggcaagctcgagttagttatttagacagttccagaagctggagaaaaaggctctgtggtgaagagcgcttgctcatctcccggtggggggagctgaatttagttcctagtagtgtcaggcacttcacaactgcttgtaactccagctgtagggcatcggacactacctctggcctctgtgggcatccatgctgcacataaataagagatacacattttaaaagagagaaattccagcctcctagccatcccttacctgtgacagattggggaagggatccgagcgaccatagttgagcccatactggctgacaatggatgagagattgcaggggctgtcatggtttttgacctttacttttaggatggtttattaatggtaggtaatcgtgagacagtggcctcagcattctctcgtgagagatcgaaccttgtcagcaaagcccacggtaggtgagcctttcctgtgcttgcacagctgccttcccggaagctggaggaggggagccacgcacaggatgggccggcagcatagctcagggatacacttggcggagacagctgagaaacagctgcagtgtggccctagtaagctgagagagtgggtgttttgttatcaactaaaggaagtcagaggctggagtctttatctgccatattcttagatgctatagagaaagaagtgttcttagccatagtctgtgctgggtcccagacagagtgtgtcaatgtgatcgatcacacaggtaaatggggaaggatttcttctcaacaataaagaatggcttagaggggggtgacagtgtttattttcaatcttatgtgcctttgtagtatagtgcccagaagcatatgtgtggtgtgtgtgtgtgtgtgtgtgtgtgcatgcatatgtgcttgtatgcatatgacatggaggccagacaagttcagatgcagttcctcaggtgtcacctatcttctttctgaatggagacttcgtttggctcaacaagctgactgactggtcagcaatcccgaaggatctgcctgtctctgccacgttatccaacacggagatgactggcatgtgttgctttgccctgcttttccccatgggttctatggacgacggaacttggatactcacactcacacagtgggaagctctttactgtccgagccttccccatagcccagcaacacagaaggagcaataattggactcatgaactgtctagcttaattacatttactttaaagtccagatatgcacacagagtcacaacacaactgcaaggtcataaaatacccatacctcagtgtcatctgctaagctaagctgtatgtacgtcagcctccaggagaaaaagagggagaggaagtggggagggggaggcggaggaggaggcagaggaggaggaggaggagaagaagagaagaagaagaagaaggaggaggaagaggaggaggaggaggaggaggagaagacgacgacgacgacgacagacagacaggaaggaaggaaggaaggaaggaaggaaggaaggaaggaaggaaggaaggaaggaaaaacaacaacaacagaatttcatttttgagcaacttggaaagatacaaaggtcagatgacatgtcccatgagtgatgtgcaatccccaggcagctggacattcagaagtgacaaggtggcctctgagtcagccttcctggtactatcgccacgttggggtgctgcccacacatgttggggttctgcccacacagccttcccaccagagcagccccagcagcctcgggctgtctctacctgttacctgcctgagacttcaggtcagtgacaccctatttgagaatgcgatggctgcggtgggtgaggatggggagactcccaggcctggccgtccaacagagttgcctgagggccctgaagtccacagtggcaaggtggcatctcctaactggctccacaggatgctcagtctgaccgtcgtcatctttcagtgtgctggagttaatgccagcaggaaggactggttaccttcagtctttgaccgcacttggcacgcccacaattctttcatgtttacttattatttatttatttattacatgtgcattgctacacagaccatgacagaggtcaacttcgtgaggtttccacactaagcacctcaccagccctggacacttcttaatgttaacccttaaggtgacaggttctttttcaagtcaacaagagaaaaatgcacacttcagtatgtgtgcagttttacaaatggcctgttagggtatagtaaggaaaattctagatttgagagccattgacctgtcctccatgtgttgctggctctaaacatttctgaattcattttctatttgtaaaacggcaatcctcgctagggtttctgttaaggaatagtatgaggtaggtttacgatctatgaagaggctaatgttctacaggtgtggttgactacaggattaggaaaacacttgctgtgggagttaagtctctagaccagcggttctcatcctgggggtccaccctttcaccagggttgtatatcacatatcttacaaatcagatgctttccgtcataagcataggaaaattaatcgttatgaggtaacgacgaaaataatttgatggttggggttgaagagctgtacggaagtgttgcagcattaggaaggttgagaaccactgtgccagacaaagctgagcataaaaccctagcccttacttacccttcagcccttaccctgaccctaaccctgagtggaaaaatcctaaccctaaccctcactataaccctaaccctaaccctaaccctaaccctaaccctaaccctaaccctaaccctaaccctaaccctaaccctgagtgtaaaatcctaacccttaccctaactctaaccgtaggtgtaaaattctaaccctaacccttatcctaactctaaccctaggtgtaaaatcctaaccctatcccttaccctttagcccttaccctgacctgagtgtaaaatcctaattgtgaccccagcacctgaggctttacacctcaaagaagaccacctaatgttacgaacaatcttcagtccgattccagcactttgtggctgtgggcagctaactgtagaggaaaatggacacctttggttgctagggtgattgatggggggaagccaagtccctctgtttatgtagcattattgagttggacctgtttcatcctggggaatatctcagtgttcggctcccagctgctcctgcatctctttgtgtagccaggagagaagggaaagtggtgtcgcacgcatgcatgcatgcacacacatgttaatgagcagaagggaaggcccctggggtatgaagagaagtcctgttagcctgaggtctctgctcagctggcccaagaagcttccagaaggagttggagtagtattttggtaaaaacgtaagcagtcaataaaactgggaagggttatcccaggatgatggctgaggcccccaagaaagacctgttctgcttggtcatcacgcttgtcctggagtggagtgggaagaacggcatgacctgggggatcagagtgtccgcttgactgtcactccagacagacatcttgctaatgtggcagctcttcactgtcctgtgacagtctgtccttcccagatctctgtaggctgttcatggccattggctcaaggcatctttgtgactcaaatgggaacatgaagacaacagtttgtgatttcagtgaccaaggcacatcagaaaatgacctaactgcatttttcttactcttttttaactgttaatgaccatgaggatttgtattgtttaatttcaaggaaaacggacataatattaaaaaaactcacattcagtattataatttagaagtctgatttttttggtgtgtttgtttgtttgtttgtttgaaacccttccccttattcttactctccaatgtttatctcctacaaggttgttgtcatatcttaactggatgaattcgctagattatagttaaaaatcagcagtttttatacacactccagacaactccactttcagaaaccatcgaataatactgaacaatgcctcaataaaaactggcaacctcagaaatattttcttcctggcttagctattttcaccttcactgtagtacgaaatatcaaagagtatttcttttctgatggtgtgtgtgagtgtgtgtatgtgtgttcgttcacgtgagtgcacacagaggccagaagtgtcttcaattgtcttctccaccatttctctttctttattttttccagacaaggtcacaaggtctttctctgatcctacagcttgctgactggcccaactggctttccagagagctcctgggatcctcctgttcctgtctcctaggactggtgttatgacatacgcgtgcacatggccttttgcatgggtgcccatgcttgactgagccgtctccagacccactttgattatttttaatgttagtgtctagaagttcacttagttctctaatagaccttgactcccagctaggtataaacagttcagataattcatctacaacatgtatctgtcacagcctgttccagtgttagccatggctgttttctctgtaaagggctaagtagtataatatatagtataacatgtcttatgtgatagcattatgccctcagttttgaatgcaaaaaaatggctcacagaatattttggtctctgccctaagtctggccagatattctcaacagaattctagctctttccatccatgcagcacactcaacagacggtcaactttttctttttcaatctatgagcacagaacatgtgatgtgtgtgcgcacgtgcatgtggaggccagaggacaaccttgggtgtcatcctcagcttcatcttctaggagacagggactgcctgtggcctaaggagcaccagttaggatagacaggtcagcgagctcccgggacgggacctccctgcttccacctgcctgcagtgggattacaagttcactctgccacacctaaaagattatacctgtgagctctggggactgaacttaaattcttgtgtttgcaaggcaaatgctttactgacttgactggtcctcctccagtccactttataatccgcaccgctggatgcggtgactgtgactttcaaatgttgggcagcgccactcactaactgccattagcattgtctgtttgcagggtaatcgttggccttcttcatatggcaggatcagatgggacctgagggaaatcagcgggcctctggagtgcagagctggatttgacggaagaaaggaaagcttttgggccttggtgagagaaatgagaaagttgggacggatatgagggattcaggagacataaagataaagcagatttcccaggcttgagtgtctccagaaggcaggaagctgccatgccgtgccatgctgtaccaggaagtcccagcaagagagaaaacctggaagcagttcggaggggaaccacaagctagggctctagctgagaactggtctctgcgaagtgttttaggtatatttttccacatgctcacacatcccagatccttgtaggagtgtgtggaaaggaaacctactgctaaatattatcatagagaaaagctcaccccaccatctcagtaagaggcatttatgaggtagactgtgattttggcttttaaaaaaaaaattagtcaaatgagctggggagatggctcagctcttagggcacttgctgggcaagcatggagatcagagttccaatccgcaggacccacatacatgccagatgaacatggcagcccatttgtaattccagcctcagaaagtagagactgataatctccacagccaaacttggaaacagaaggttcaaccccaggcctccacaggcacactctgtacacaagctcgtgaaaaaatggtggtggagagggtgtcaagacagtgagtcattttgaaactaactactttgcaattaggtaatgtgtctcatatagaaatggtgagacacccccaccccctgcacctgcattggtgtggaactgcaaccctggaaacctaggtgcaggactggaggtgttggcccagttgatactgtgtttctctacgtcatttatgaagccctaggttggatcccaaggaccacataagcccaacagcagcagtcacagcccttcttgggaggtgagggcaagacctacatggcaaagtttttgatctactctcaaaagaaaagaaagggccttttataactgtttttgtttttgtcctgacctgaccctttactttttacttcgaccttgggaaagcagtagtttaatcagtatattttgtgtagttcccctgaagctggctgtcagacccgtgggagaaattgaaacagtgaccacctgggaaaagtttggtgacctccagccatgatggcgacctacactaacttcaatcaaatgcggttagagcactcctgttttggtcttagttttgtttccataacttctagcaaatgtctctctgtggcagacctagcaatgtaaaactcatagaacctctggcaggaagaggctgtgtagacaccatggaccatctggcttgatggtacctctgcagtgtcatctcgagggatggaaagctttgggacaggagctctgattgccagtgatgggagagaatggtgggcatactcagagggtcctgtcagtgtcttcactgcctcatacagtgtctggtccttttaaatatctcctcatattttcagtaagaagtgtcaagcgctttaaattttatttctttaaaaagccttttatataactgaagtttaacaagctataacatttcctagactgtgtgtctggatattctgtttaattataaacctgttgccatggagaagggatggcacagacctcagggatcttgtggctgacacgggaagtagaggagccactgcacagttggatacatcttagcgcaggtacaggtgctccgtgcccatcccagatgggttgtcaagcacattcttgtatttcctcttcgaggtatgtgtccctctcaccctccctccccaacacccatgttggttgtattggctggttttgtgtcaacttgacacagctggagttatcacagagaaaagagcgtcagttgaggaaatgcctccatgagatccaagtgaaaggcattttctcaattagtgatcatgagtgggaggtccattgtagatggtgccatccttgggctggtagtcctgggttctagaagcaagcaagctgagcaagccaggggaagcaagccaataagtaacatccctccatggcctctgcatcagctcctgcttcctgacctgcttgggttccagtcctgacttcctttggtgatgaacagcagtgtggaagtgtaagctgaacaaaccctttcctccacaacttgcttcttggtcatgatgttttgtgctagaaaagaaaccctgactaagacactggtgtagttcaaagtcaagagctatataacttaaaagttctgagttcggcttggagcagaggatttcatattgagactgaagacctactgaattgatcacttctggaaaaagaagtactaagatgcatgctccccccatccccccccccacacacacccgaaagaacacttcctaccactgcttagaaacctgagagtttgtgcccttggtgtctccagtaagtgggccatgctaagaggctgggttacactggtatgttttcaagcatgcaggtgtcatggcatgtttggatgtactgtgaactttcaagtaccagagttgtggaattccccaaaagtcctaatgatgttgcctcagcttttggtacttaagaaccttgtccttgttcaacatgtttctgaggtgtcttgaaagggcgagccacgtctccatgtttgtgtaactaccataagaaattcctttctggagctgcacaactcttgtaggtgcatgggctgccctgaaatccatggctgcctcgagtatttatgatctctgtttggccccgttgaccacatacttgacacttcacactccttgccatagcattttctacttcaggggtaaagggggtgttccacttggtcttttgctaacagcaggtaggggacacttcttcaaaagcacaatcatcacaccttggaagcttaactacaaaagtatccctgggtcctgatgctgcacaaccaacttcatgactaactttgagatttgaagtagcaaagtgagagccgccagaagcagtaagggatttctttttgcaatttggagtttatcttgatagtttcttttgccagctaatgtgaaagtgacagattggtgtgtggccaggtgactttcaactcaaaaaaaaaatctggccttcaggactgctgagctcattttgccactgactcacccagcacgttgtgactggtcccgttctgtttagaaagagtgaagcgccaagtttaattgagggagtctaaaatcccctttgctttgagaaatgaggagcttggtgctttcctgcctcctgaggcactgccctaggttgattgcgtgcatctttggcatgtgagatggagtgagcgctcaccaccagctctgtgagcctatgtccgatttgcatccttctcttggttaatgattaccatccctgacattgccttctttctgctgcacacaagtctagaagattcacagaggatttaccactttcctacccagatgactgggtgtaccactaactcgggatgctgagtgtccccagggagcagtgtgcttcccgcaggtgtagcaggcagaagctgcgatggctccaaggcttccagtggcttgagatgctcacccaggaaagatgatgatttcctggggtttttctttccttgtagggtttcctttcttcatttttattctgtttggaagcattttgtgaactggatatcaatatagtaagaaaagtggattataaaacttggaataaggaccatttgagacacaaagaagtcttcggccggcatatatgttgcctcagtgaagagagtatcactcttaaatctgatccctgacctcagtttaattaggagaatgttatggtttatacatgcatggtccagagagtgtggaccttgttagagtaggtgtggcctcattggagtaggtgtgtcactgtggagtaggcgttaataccctcattgtagctatctagaagtcagtcttccactagcagcctttagatgaagatgtagaactctcagctctgcctgcaacatgcgtgcctgcatgctgccatgctcctgccttgatgataatggactaaacctctgaacctgtaagccagccccaattaagtgttgtctttataagatttgccttggtcatggtgtctgttcagagcagtaaaaccctaactgagacaggatgatgggaagggtatatagaaatactacaaattgtataagttacatttggatcatgaattattgtcttagtcactgttctgctgctgtaaagagactccatgactgaggtaacttataaaagtaagcatttacttggggatttgcttacaatttcagggggttagtccatggtagccatggtggggagacagatggcaggcaggcaggcaggcaaggtgctagaagggtagctgagagcttctgtcttatccaaaagttggagggacagggagacagagagacacagactgggaatgctgtggggtttttaagccttaaagcccacccccattggcacacctcctccaacaggccacacctcctaatccttcccaaaacagtccatcaactaaagaacagacatttaaataaatgagcctttggggctatctatagtcatccaaaccaccatagttattatcctaccagctccaaattacttttgtgtgtgtgtgtgtgtgtgtgtgtgtgtgtgtgtgtgtatacatgtatgtggtatatgtttatgcaggtgtgtaatgtctgtgaaggtaaggacatccctgtggaagccagggatcaagatttggtgtctttctttgttccaccccatctcactttttaattgagttttatttattagtgtgcttggatgtgtgtgttttatatgtggaggcatgccatggtgtatgaatgtaggtcagggacaagtctatggaattggttctccctttccaaccttatgtggctgccagggattgaactcaggtcatcatacttacaccgttactcagcaagtgcctttacccaccaagccatctggccaacccctccttatttttgagacaggctttcactgaacctggaactcatctgttcacgtaggctggccagtgaacttctgagttccacccatctcttgcccccttagtactggaattgcagacatacattgctatgctagacttttttacattgttgctgggtgcctcaaagttgggtcttcctgtttgagcacaatgagtccatcaactaaagaacagacatttaaataaatgagcctttggggttgagccatttctccagcccccaagtggtggatttattttagtgtaactgaatttgccattgtttttcactgtagatatctggaagttctactaggatctgatagtaacaatgctctcttgatcatgagtaagaatgcattaaggtgtaatgttagcttttgatacattgtagctttcctttcattaacttttttcctctatactgaagtcctagggaagcctagaggatgctcatttgcggtgtttcttggtttcgctttctgttgctgtgataaaatagaacactggcccttcattagaaaaagtcaaagtgtcagacattcagggcagtagtaacatctcacacagttaagagcatcagggtctcagctccattcctctgctcttgtataatccagggtcttctgtataaggaatgacgccacccatggtggctgacacttccatctcaatttatataatcaaggtacaccctgctcccccaagatgtgtccacagcctatcttggttatcctagactgtgttaacaactaaagataagtatcatgggttctctgaagtaatgcgttagctgatttttataatagtttcaggtcttcctcgctgtcttacataactgaattttaagttatataaaatgtctttgggtttatctcaatttcatactgacccttagtagggcttcttttatctatcttattttgtgttctctctttaaaaaaaaaatgctgttgaaatagaataacttcactttccttcttccctttccagccactcccagaggccctccctcaaatcccttccatggatgccttcaagttgatagcctttttctttaattattgttatacactcatatgtttatgtgtgtgtgcatataaatatatgcataatatataaatatatgtgtgcatataaatataaatccagtgtgttaataaatataactctcactgagtctttttgtcctttgtgtatgtatggttttagggttgaccattttgtattagacaacctataggggcctcatccttgggagcggctccctctctatcacctcgcactagttgcctggagttctttgtctaaggatggaaccttgtgaaatttccccccttcatgttaacatggcattgatattcccactgttccagtcttatttatgtagccaactcttggagatattgtttcacagccgacgctcttaaccataaatgcaagagtgtcatgtagctgtatttattggacctaggcctttccccctgaagatgtatacctataacatgtttcttaaaaatgttcagccacttgggccaacagcattccccacaaaaaccatagagtaatagagaaaatccaagtaccaaacacaagaaaccctccttttgaactgattgcttaggataatccaggtgactcctagaacatcatagattatcaatgtcaccctctgttgtctctcggggtttgaaggtgcacccctatagctgtataaatactcataattaaacccaggacatcataattcaacctggatctgacccaaaagcctcttttctgtggtttcgctaccatggttacagagaataccatgcaagctgccaagggaggaaacaattaaacagtccgacccagctgcaacacctgtgaaccatgacagtaaccagcatggtgagatgtgcgtaaaggtataagtggttacccttttctcgtgtgtgtgtgtgtgtgtgtgtgtgtgtgtgtatgtctatacaaatatgtatacagatatatgtatatataaatatgtatacagatatatgtatatatatatatgtataattgtttatatatgtacatattcgtatagacatacacctatacatatttgaatgtgtatatgcccgcctgagtctgtgtaaaccacatgtgtgcaggtgtgtccttgaatgccagagctggggtctaagcaactgtagaggggttgtgagctggtgagggagctgtgaacctcacctggtctactgtagagcagtaagcactcaactgctgagctgccactcagtcccctactgggggctcttttaagcccctgtagtgatcacactcatttttgtgaactttagcatcttctctctgaggacatatttctgttttttatatcctgccacatgttttggggaaaataaagtaggaccgtgggatatgttattctggctgggctgccttgtctggtctcagtggaagaggatgggcctagcccctcagagagttgatgtaccaggatgggggctgtgatggtttgtatatccttggaccagggagtggcaccatctgaagttgtggccttgttggaataggtgtggcctggttggaatgggtgtgtcactctgggtgtgggtataagatcctcaccctagttgcctggaagtgagtcttccagtagcagccttcagatgaagactagaactctcagctctgcctgcgccatgcctgcctggatgctgccatgctcccaccttgataataatggactgaacctctgaaactgtaagctagacccaattaaatgttttgttttgttttgttttgttttgttttgttttgttttgttttaagacttgccttggtcatggtatctattcacagcagtaaaaccctaactaagacagggactacacgtggaggggggggggtcccacccactcagagagaaggagatggggaaaaggattgtgggagggatgactgggacggggcagtgagcaggatataaagtgaataaataaaaaaattaattgatggctcagcggttaagagcactgactgctcttccagaggtcctgagttcaattcccagcaaccacatggtggctcacaaccatctgtaatgggatctgatgtcctcttctggtgtgtctgaagagagtgacaggtactcacatacaaaaaaataaaaattaattaagttattaattggaaagatacccaaagattctctgggtaagaggtgcagactttgtctttttgttcctttgttttcaccatttcagttgtccaaaatcaggtggcttgctgcctggtattattatgtataacaatgacatagtaaatacttgttgacagaatgcatgcattaaatatgcccttggggccttccttaaaaaccaaaccaaacaaacaaacaagggagcttctgctgttgcttgtcaattgcaggaagagtggccttgcgtacttcaaggttgtctgtgaaggtcagtgctttgccatcctagagttaattaaatggctcctgctacctcatgttgatttcaggaaagtttttccggtgtgcttcctcagcacgacatgttccttcgtctcagctgtccgtcagcactgtccagaacgcccaccctgtatagaattcatagcctttcccttttagctctgtttcccttacagacagttatgtttccatgccttctgtcaggtctctctctggatgggttcagttattggtcaattcggagagaaagaaaccctatacaaaattgcctggtgaagtctagaaggaatggtcagctctcattctagatgcttctaactagtttctggaggaagtactacattagtccccctcttcccagcacacatactaacaccctttccccctcaaacgctagctctgacagggttgctatcaatcaaatcaacttgtttgtggaattaatgttaaaccccaagtagatagttaatgaactgtttcccctcttttaaagccatttttaccctataaatctcagagtgttcagtgtgctgttacctgggttgctcagccaatgaagcaccagatattaagatgcagctctctcaccattgcaacatctttagcatattttctaagtagctcctcatagttctgatatataaagtactgagttgttggtacacagttcagaaacattggaggttttcagatatgagtgcacagtctcactcagtgtcaaagtctatcggtagtcattcatgatggttatatttaggtctagagtggcaaggaatataaatgcaattaaaacctgaacatcaactctatgatagtcatgctaatgtaaatgtagaattgacatagcaaacatttaccgagtatctgcttgtagaagtacagttctgggggttggagagatggctcagcggttaagagcactggctgttcttccaaaggacccaggtttaattcctagtacccacatggcagctcacatttgtctgcaactccagttccagggaatcggacactctcagatataggttacaagcaggcagagcaccaatttgcataaaaaatacaaatcatgaaaattgataaagatgttctgttttttttttataaaaaaaaacaaaggacagtagttctagataaagttctttcttacctttgacatgtgatatgtgcagttatgggtgcttatgtgcatgtctgcaggcacggggtctgtgaatgtgcatgctgagagccatgactgacaagggaagtcttcaatgattgttctctaccttactgattgaggcagggtccttaagtcgtgcccagaattcactgaaacaggctggtcccagtagccagcttgccctaggcatccctggtctctgctttttgcacactgcaattacaagagggatgccatacccagccaacatgtacatgggtgcttggggatccagactccagtgctctgcttagagggtgagcactttacccacggagccatttccctggcccctggctttgtagagtttaagtagctatcacctcacttctcccagggccagagtggccatcagtatatcaacacggctacaaattcaagacattaagttgacatctgcaaaccttcactgtcattttctgaaaggtgagtgttgagaagcatttcaaaataccttatagatcatcccagtgttcaggaggcagaggcaggtggtagtttgagatcaggctggtctacataatgaaatccaggatagacggggtaaaaccatgatacatcatcaccatcaccaccatcatcatcatcatttaataccaccaccaataataataataatagtagtaatggtggtaaaaacttcttaggaaacatcaccttttctgtcttgctaaactgtttgtggtttaatttagttataaacttccgccagtgaattatggtttaggtatggcagcatcatagaaagatgaaaaacgacatgcgtttagtccagtccttgtcacgttgacaaagctttatgagaaatgaaagcaagggtcagcatgctgagagctcctggagtcagacggttccagaagctgcagtgcggcccagggtcaggttcatagcacccgggaccactcctgaggagggagtttggaagagctggcacagatagaaaaagccactgggttcgctgatgcatattgggcgcagtgatgtaggctacatcattttcacctcatttgcctgccctgcaggtagaaattatatttaggatcgtatctggtggccaggagaggtgctcctagaaggtttagaatttctaggacattttactctctttctgctacagtgttaaacaacactttggctcacctagaatgaacagctgcaaactggcgttatcacagaaggaatttagagtgcccatggcctttgagaaactgggagccgtattttgaacaagtctttaaccccttggctagactcataagttgatgctctttgagtttaattttatcctcgtttaactctctcctaaggagcttaataaaggtctgtatgttcacgcaagcagctcttcatacagcatgaaattcccatctcattgataaccgtttgcccactgccgaagaattcaataagacagaatgcttgacttgccgacagatagagggcaaagtgtcactctttgataaaccagggaacagaagtgaatttatgtaaaagaagtgcccgaagagaaaggagatgcagtttctctcctgatgtgtgcttccttcgtggagagatcatagcaagaagttactgtcatagtcctagagtagaccctagttcacaagacgacattggtcctcacgatcctgagttcccttctgcaggacaggctggctgaagaacatggctataggagttagattcagaaagccctgcctttacacgaaggttccctgctcctgttctaaccgctcttgaggatctagagctacctaaaaatgtttaatatataaatatttttgcagtgtgaggtctttaagaggttttgtggggagtgtttctacttgcttcctcatgcatcataagttttgtccaaaggaaaactccagcctcggtgaacagtggagtcattgtgtggggcttgctttgagctcaggtcagagacatgcctctgacaagctgcatgcttgccatgaccatttgttctgcctgaaagaacaatggtagacaaagaccagagctcactcgctctgagacaaagccgagtgagtcctcttagacctgttgaagaagaaaaatgaggagggagccataacaacattcatgtacgtagttcatcttccacgtccctttacatgcaatccgatcatagcttgaatgcgacaaggaaataacctttaaaaatcaaattatagtagagctctgctaattcgtgcctgactgatttgccagcccagtagttcttgtagaaatcatgctatccctcaactaaatgtcagagggaaatgcagtattagggtatagagaaggctcacattatctagttcaaggctcatgtgcaaaatgatagatgtccaggtattgtgaccatgaccctgtaagagcagaaatagagccacaaaccagtgaagaaaagggaaacccagatagtacttttttttttaattgttggatgcttgtgtcagatgttagacttggatattttgtgtcaaatagaaatgctagtcctatgggtgggccccctagtttaagaaaacctgctgtcaaatacaggagtaagctgtggaaacgagtgtctgcctctgtaagggctgaccatgaaacaagctagaatctcagagaagtttcatagtattttcagacagaatcttgttgcgtgcaaagaaataaaaagtgagccaattaactatgtgccgtaatgcgtggacagctgccagcttcagtttgctctttgccaaataaaagtgcaagggtccattgatactgtttccaaaacccttaggatgaagagctaccagatgtgtctgagcagcagaagtggtttgttttgtttttaatactgggcagatgtgctgcactggacactttgccattgtgtccgtgtggcaatcagaggacaacttgcaggagtcggttcaaccttctcccatgtaagactcagggatccaactcactttcatcagacagagcagcaggtgcctttacacattggaccaactccccgaccccaaaatatgtctgttttaattgaagggtgggaactaggtcagattgttactttgtagtataccctgccccaggctggttctaaactcaccatcttccagcctccgcctcccaagtactggaatttcaggtttgtaccaccacccctgacctcggatctgtaattttgtactttcaaaatatggctctaagccacccaccgtcttgcacatggcctgtggctagtgtgcctcttgaggtgtaagatgaagccccacacatgctcaaaggcccattcctccagctacagtagccgctgccagggatagcaagagaagcaagaaatgcttcagcaatgagggcaaggaagcctccacttggcacctcctcaccaccaagcatttacttgagtgccttcagtgtcctggagaagagagtgtgccctgtggaattcgtacataaaattacatagtacaatagaacattaatgtatatcgtacattaatttatctacccctagcatataagcaagtaaataatattaatgatttacaacattaaccaacaatcaacatactatatgtacttcaacatgcctactaattactacattaaattaatgctttacggacatatctgtgttatcagacatacaccattatgtcataaagtcttcttttccatatgactatccccttccccatttggtttattaatctaccatcctccgtgaaaccaacaacctgcccaccaatgcccctcttctcgctccgggcccattcaacttgggggtagctaatatgaaactttatcagacatctggttcttacttcagggccattaaatgcgtctataaggtgctagagtgtgacatgactgttgcattttccaattacacttcaagttaacttcattgtaccgctggctttgtgtaagattgtgtaaatctttccatagtaaaatgaattgccttagctttcaggaattttattccttacccatcaagctcccagtatcaaataaagtaatatagttgatatccacctcatttccctgttaagacgacagctaccatctatctaacgatcagacatgtgatacattttcacaaacctaggaatcgtcactgaactttgtatattcagagcctgtgcctgcttgtcacacagcacaggcattaaatgtattgtttgtttgtataagtggatgaatgaacaaatagaagagttgactattatcccaaccatgtaccctcgggtccaggaatcagaaagttcaataaggaagtaaagcacacaacattcttttgctggtcttattggcctagagtatttattgtgagagcagattcacagtcattgtttgacagaacagtataaatagatgggtagccgccgttggacctgacgtcactaacgggaaataacaacgcagatgacgcttctgatcctctgcaccacgcactgccaccagtgatgaaatcctgcttctggcaaacatgaaacagttctagtaccatggcttggcagtcgctcccgtgtatagaagcagcagtagccaaccggagccggttgaacatctcaaaataatcccttatcttgttgcacttgaaaatagcatccatacagagtaatatcttagagaagtggcagcttagaaatgaactcctactgtgctttcagcagcttagggggaatttatcttctcccagatgggacttggagcaaagggatgtgacatagagcagtggccgggttctctttgatggaatgcggatgttcatgcagggggccagttctcatgctgtgccatttgcttacaaaggtagcatgctgttgttgggtttttttattttgtgtgtgtgtatgtatgtatgtatatatgtatgtatatatgtatgtgtgcatctatgtctacacctgtgtgtccgtgtgtatttgtatatgtgtgtgccctcagaggccagaaaagggtatcaatccccctggagctagagttagaggcagttgtgaaccatccaacatggctggtggaaactgaactcaggtcctctgggagagcagcatgctctaagccagtgagccatccatctcccagccccagcgatggccaatgagaaagccactgtgcggcccattcacagagacaggtgtactggggtaccctaaatctaagtggcttgatggacaaggcattcatcactcaagagactccagcacaggtcacattggtcctgtgaccacagcagggacccaggacctgtaagctcacatttgggctgatacttggtgatacttgtctcgggtccactggccatagttagcgacgtggcctgcctgccagcaaggaggctgaaaagtgtgggactgagagagaagtggaagatggtgggcagaatttgtatattaaagtctactggcttgaggtgccctaagcccaacaccatagctgcagcctcagaacccacagttgtctaaccacatgtccactggctgtttcctatgccccaagcatgaccgaggatggctgattctcccagaacatcatttactggctggcataaccaatgcgtaacctttgcctgagaaggagaatgtaaacccatctttacatttcttatttaataaaagattaatctcatctgtggattttaagacggaagaacagttggatgaaactaagcactgatagttgttgttgtgttttataaaaagaaagaaaaagccagggatatgtttggtagaggtgccgtatgnnnnnnnnnnnnnnnnnnnnttaccagccatacaatgggtatagtatggaatataatttatttagggcatggcaggtgagttgagggagggcagggagagagagagagagagagagagagagagagagagagagagagagagagatgggggcagggagagagggagaaggagaggggagtagaggccagccataaacacctggggtggggggatgggaagagaagggacagagagggagagagtaagagagcaaggaaggggtgaacagccccttttatagtaaaccaggcatacctggctattgccaggtagctatgggtggggtggagcctagaaggaatgctaacagttgaaacgggaagttccccatagatatgataaacatttgccaaaccagtgggtatggtaaacacttgccaattatcggtagtggtcaagataaaagcatagttggttttcctcacccccttcctctgtgctgccaatcacacccttctgaacagtttttctcactgagaaagaaaccagcttgcctggtagagtaatcacagcacccgggaggctaaaacaggagggaatacccttggctacagaatgagatcctgtctctaaaacagcaaacagcaaaccagttatcttcccttgccagggcataaccagtgagagaagttacatgtgtaagtgctgtggccactaattagctgtaaccctcaagtgggaaagccacataaacgcacaggcgaacgatcaggcgaacaatcgaatgaatgaacgaaccacacccaaggcatccacaaggggtgccccattcacaccctaaaagaatagagattagagcttcaaggtcacgagtgtcaaagggcattaaaccaaatgttccctccaggatccagatgactttaatgctcctcctcagctgaggcaccccaaccctgagtgacacccttcatcacctgtggccaacactgtcctgtggcttcagtcttcactcggctgttctgacgtctgcagacatcccttcccctgagggtgggcccagttttaggtggatggctacagcctttgaccctttggttttctcaagctctgttacagagctctgctacctctgcctgaggttgtgtggagggttttggttttggttttggttttggctttggctttggttttttagctacctcctcacctgtccagttgtctactttcttcttgggcacactgggccacacatacacaagacacacttcctctactccgcctctggttgtattttttttaacctgtaactatattaaagctcattgagatgtgtagacttctggtctggttggttaactttggtgtgtgatgctttttttttttgcaaaatattttaataataaagtttttttttaattggaaagatgaaaagtggaagaaggacaggaagacacctgtgtagttttttgcttttttttttttaaacaactttagtttactgggagctcagcgtgcctttgacataggatggacctaaaataatattttcctccaaaatcatttcctgagttttcattgataatataaaattgcttaaggaccaggaatggagactaatggttcaaagaaatatgcaacaatacaaggaaaaagacttttaatcgagcagaattgattgatgattgccttgcatctacagtaatggttaatttttttttcatttttgaaataatggtgtgtgtgtgtgtgtgtgtgtgtgttacatgcatgtgtgggcacatgtgtatgtggttatatgtgcatatgagtgtgttccaggacaccaaaggcaatgtcacatgactttctctattctgctctaccctgtgttttttgagccaaggtctcttcattgaacctggagctttaccattgcatcgaggctggccaggaggatctacctgcctgtctccatgcacaccaccagcccagctctggggttatatgtatgatgctgcttctgtgtctggctgggccactagggcttcaaacccaggtcctaatattcatgcagtaaacactgtatctgctgaaccatctgcccagcctcctaaatctctgtattctttcctaactggaggatcttgctgtttagtacagttattctatgaagataaaattagaaatgatttctcttcctggccacttaagtgccagtgtaattaatgtaccatcctagctgttttgttttgcttgtactgtaaagatacaagtcttttagatattaatgaatttccctttttagcagtaagaagaaaactctgtgtacaaatgcatttgtcattctcccgagtccatgttgttaaaatgtgcagtaattttcaccacctggactggtgacagcacagttcctaagtagaccagccatgtagttggtcacataggtaaaattttaacaatgattcatataacctagtcttcgcaaaataccttactcatatatttaatacttaatttctagcatgttctgatttctgggtgaggagattttaatgtcaggaaatctttcatacgttggtttgtcttcagcgtcacaaccccaccccaccccacccccacccccgttttgctctgccctttacagtggcaggtagggaacttctcacgtgtgcacaggggactcggagcaagtcaatatcttggaaatgtacaatgcagctttctgcttcctttgttcctgaaatagactgaaggattccccttcccaccaccttctggcaacatattccttcttggtttaggtagccaagataaacgaaaaggtctctgtaaccctccatgggttgcatctatttggtgtttgctaattttataactgcatcattgcgttcgttgttctggagaaagtcgcctctggggtgggaaggaaatgcttccactcaaagcctccaaatccgctcttctttctttttttttttttaaccaagcagctgttcgtacagcttaggcattctgaggaagtggctgaataaaagtgtaacggttccgaaatgagccggcccgatgccgttccagcagctagcagctgcggagatacgatttctgcaccgcgggcggggacctgcttttctgggttaatctcagcatttcacatttggcggacactcaagacccttctgggttttgttgttgtttggatttggggatgtgcgttttgtttggttagctttagttctgttttccgtttatgttttgcggccttagataggtgcaagtcgttgaagtgatttttttttttttttttgcatcttatgtttgcgtatttttttttccgaccatgtgtctgtccctggcatgtgtgcgtgagttcttaaaaatgcgtgggtgtgcgtgttggagcagatgtaagtacatttgttttcatatggaggcccaaggttgagtcgaaaatctttctctctttctgccgatcttattcaccgaggcatggttatttgactgaatacatagcttgacattacagctagactaatagccagcttgctctgaaaacccccccttcttgccttctaagcagaaaggcaggcaggccacctggcatttgcataggttttgtgactctaaactccaagcctcctgcgtgctgcttgtacgaggagccctttaaccagtgagccacctcccctgaccttgtgttctgatttaattaatgatctccagcaagcagacatataaaattaaactattataacaacagtccccacaaatacgtttggatgacaagtgcatttatttttaatagagttgagaggcaagagtattattggggttctcggggtggagcattccacctctgcacgcgtgcattgtctcccctggtatggtacatgtgtaacaacggatgaagatgcatataacacaagggttcattaccatccaagtcacagttgttgttaggagtattgtcaacccgagtgacgggacaaggagaaagcagtcattgtaagatcttagaggtagcccagatagattacttactttttattgcactaaccaactacctaacagaactcacactaagagggagactttattttgcccagtagtttcaaatggttcagtccctggctacctggtctcatactcttgggcaccagcaatgtgtgctggcagtaggtcctttcttcttagacaggaagtggcactcatgaagttgccagggctacaaggacacatccctggggacttacttcctgagttcttttcattgcttcctaatgctattagtattacaaatttctaggggattgatccattccttggtcagagccctcttgatctgctcatttgtagaaatatcatcacagacacgctaaccccttagcccagcggttcttgacctgtatcaacattacagttatgaatagcaacagacttaatttcatgccttagagtgactacaacatgaggaactgaattaaagggtcacagcattaggtaggttgagaaccatggctatccttcatccaacctggttgacagtaagttacccaccatgatagagcaatgttctgttccttctgggtggacctcggttgacatagccacttacctactggaggacatcttggttgtttccatgttttcatagttgtgatcaaaccgctatgagcttcaaacaaataatcaaatgaaattgtaatacttcggtattgacactatctcgctgatcatgtagcatcagcaagtgcaatctaaaatgagttcattatcttactgagggtagtctagtactgtttttctggcttatctgtttctacaagtggtgaagaaagacagttgaacagattatacattaacaggtatacaagcagctacagccatgactgagtatgtggggcacataaattaaaaataaaaatggccaaatgtttttgagaacgaatctgttgataggacaagaaaatgtccagggtttttgatgaggtatcttgacagcaagtgccctaactctaggacatccttaattcaatcacacctgcaggcactgtcttccttgttacattaggacccgaatctttgcaggctataacctagcttcccatttttcacaatcgtgcgatggttttcctgaagaaaagccaaagtatcccagttgagacctgcaggagcccattgtgtccccaaggtactatggggtactatggggtggtgtccttactaagcacaagtacccagagagatggaaggtactatggggtactatggggtggtgtccttactaagcacaagtacccagagagatggaaggtactatggggtactatggggtggtgtccttactaagcacaagtacccagagagatggagattcgtaaactctgtttcttacaacaacaacaacaacaacaacaacggggggggggnnnnnnnnnnnnnnnnnnnnnnnnnnnnnnnnnnnnnnnnnnnnnnnnnnnnnnnnnnagagagagagaggtgtgtaagcagttttatgagggaaacatgaggatccctggagccttcaacgagtgtctgagcccagtggcaggctgctctctctgtaatagctttatgaaggggcacattcagggagtggggggctcaccaggttgatgctacttctcaaccacttcccttccaacactgtgatttttttttcctccattgtccctaagattccccctcagaaagtgtatttgctgtggttacttcccccaagatccccctggagtatgcttcccagaatttagtcactgttcctcttggtgtttctctgatgatgccatagtctgctctcctgttgtccctttctccagcgaaacaccggttctaattcttgaagggaggaaactaaagggcgatgatcccatgttaacagacatgaccagactcaccttgataacagaatgtaagcaagctcaaggaagtctgcgtcagcagcagcctgttaaaatatgtgtcgccatgttggtgggaaacaggcctttaaccccaacatttgggaggcagagacaggtggatctcagtgagtttgaggccagcctggtctacagagcaagttctaatacatccagggaaaccctgtctcaaaacaacaaacaaacaaacaaacaaaccaaaaaagtcatgtgacacaatgttggacactatgatttaatgcttgcttgacctttcttcatgaatgtcatacgtcatagtgtaggccatgaaaatattccttggaaagagcaaggctgttgtgattccttcgactgtgttaagaggacctaagtttctctttgtaacgtggggcattggaagaatccagggaggcttgatgtccaacatctcctgggaccttgatcatctttaagtctacagggaagtaaagaggacaagatgagcttgtggttgaaccctggatctacatagttgtccccactcatggtagggcgagctacatgctgatacttgagtgaagcacgcctgagattgctaatagcatctccattgaagttattgggagtggtttcattggaatggtgcgtgttaaatgtgtataatgcagcattgtagattggcgtttactttctctctctcatgtgtttccttaagtaaggcacatttgtggactgggagagtttaacggctctctttcccatactaccctaagtcctcaagcattgtagcacagtatggccaattaaacacttcatgggataaccagtccaccttggatatagaccgaggtcctaaattatattttatatgacagcgtctctctgcgttttcatccccctggacatctcaaattgcagaatagcatatttcgtccagggaaaataaataaataagtggttatgttgcagactgttgctaatggcatttggacactctgtaacatgactgaggattccttggcgatcacattgatgaccgatgccctctaaatgttaccttcagtcaaattacctgagtgtctgtatgtttgtttgtttgtttgtttgtttattatatgtaagtacactgtagctgtcttctgacactccagaagagggagtcagagctcattagggatggttgtgagccaccatgtggttgctgggatttgaactcaggacctttggaagagcagtcagtgctcttaaccactgagccatctctccagcttgagtgtctgtatgtaatgaatatgcacagctagctgtgtctgtgtgtgtgtgcatccagagagagagagggggggggggagagagagagagagagagagagagagagagagagagagagagagagagagagagaggaaggaaggaaggaaggaaggaaggaaggaaggaaggaaggaaggaaggaaggaaggaaattcttcctgggatgcctgtatgtgcatggcatacatgaggaggtcagaggtcagtgcctcatactttccttcatggttgtccacctttttgagacagggtctcacttaacctggtactcactggttagctacagtagctcacccctcaccccagcactggggtgacagatgtaccctgccctgcccagtattttatgtgtgcctgggatgcaggctcagttccccattctctcacagtgagtgcttagtgactgagcctcccccccccaccccccgccccttacattaatttcaatggagagatggctccacagctgggagaaccagatcatcttccagagcacccagattccattcccagcgtcccacaaggcagatcacaccgtctgtaactaaaatctaaaggatccattctctcttctggccttcgtgggcatcaggcatgcgtgtggtgtagagatacatctgtaggcaaaacacccatatacataaaaataaatctattttaagtagaaaagagaggcttctccctccccacactgaaatgctgattgtctgcatgtaattgcatcctgcataatataccctatgatacacacaatgcccatcagcgccttcttccacatacctttgcacagcacaccctgtggtatataatgcgcatcagacgtagggggtggggggctannnnnnnnnnnnnnnnnnnnnnnnnnnnnnnnnnnnnnnnnnnnnnnnnnnnnnnnnnnnnnnnnnnnnnnnnnnnnnnnnnnnnnnnnnnnnnnnnnnnnnnnnnnnnnnnnnnnnnnnnnnnnnnnnnnnnnnnnnnnnnnnnnnnnnnnnnnnnnnnnnnnnnnnnnnnnnnnnnnnnnnnnnnnnnnnnnnnnnnnnnnnnnnnnnnnnnnnnnnnnnnnnnnnnnnnnnnnnnnnnnnnnnnnnnnnnnnnnnnnnnnnnnnnntaagagtcaaaggatagctattgtcactatttctcatttgtaatttagtctcaacatgtgcttacctggtgtacgatctgctatgtgtcccagtaactgcccttagaaaatggtcacatctgtgctagtgtcttcttgagatttctttctagaaaaaaaaaaaatgctcacagcatagccacaccatcaccaccaccaccacccactgtggaactgaagtttttacagagtatcagcagggaattcttatgtgacatgggcaactgtgggccgtttgtattttctagaatgttctcactcatgaagcacgtagcctctacccattcattcatttgcaagtgtatgagctcagagtgcatgtgcatgtgggttttccccgagttagggccacacatgcatacaagcaaagttgacctccggttctttccttaattgctctctatttattgagaaagggtctctttttttttaatccaaaagtcacctgtcagctagtctggctagccagcttgctcaggggatctgccgtctgctggctgagacctgggatttcaggtggctgccatccatgtcctatgtttatgtaggttctgggtatccagcctcaccctggtccccacttttgttccataagttctttatccatcgagccatttccccagctccactctaacccccatattatcttctaaagaaaaaaatttaaaaggccactctgaaatccgcagagagtgctccctatcttgaatttagacccagttctgtaatcttttatcttggttccttttcttacatggcatcccttcatttatttactttctaagggataatgaactctgtaacatctcgttccataatttaaaaaacccaaactgttacttgttttgcccccacagagtagaataggatgtctccaactgaacatgctgaactcttcgcagtacacaaacgaggaggtctttggtaggagcccagacgagctcacccacagggtttgctgaaaatagctgtgtgctttccagttggccggtcctggcaggagctcgctgcttatcctatttctcaacagtgagtttaaaacattcactccatagcttcctaagcattcggtgtgaacttgcatgagcttcctgcacacggacgtacaagaggtctttagtccccgttttcttggtcgcgagaaggcccagagctaatgattaaaccaactcgttgattctgcagctgggaccagcaccccaagctctaggcataccctaatcccgtaagacagtagtgtgtctcaatctgtaggtgtcaaccattttggggttggtcgaacgatcctttcacaggaataacccaagaccgtcagaaaacacagacacttacattatgattcacaacagcagcgaaattagttatgaagcagcaacaaaaaataattttatggttgaggtcaccacaacatgaggacctgtattaaagggtggcagtgttagaatggttgagaaccactgcctgaagagatctttccctgtaccccattactggtacctgtatacctggcctttgtatttctagtgggcagtggctttcttccttttctcttgctttgagccatcagtacaagacatccaatgcaacagaggtgagggtcagggctaagcagtaaagtgaggcaccggggtgcaaagtttaagtaggtgagtcctaccatcattggccagccctgttgtaggctttggtagcctcatcctggtgggcattccaaacagctgactgcacatacactcactgcaatcacaaggatttgtctggttgtcgatcgtgatccttagaaaagaaaaacgataggggagttagcgtttttctccccagatttgtcctgtgttttgggacatagcaagtttagcacactcattctaattgtggtgacttgatcattgaaacctactgacagggatgtcttttccctttggccccaatccccttgcccttgttcttggtccttcctggctttgatggcaagaccgctgtgtgcttctgactagagcttgacgcccggttcagtaactgctttagctcttatttttaaacacctcaggcaggcaggaagctcacctttgatatggatctctatggattccttacagccatatgagtgacctgtctcaccctacgttttacccagggagctttggtgttgtttatttaagtattccttgggcatggagggaaatcatctggaagataaaagatctggaagacataagatctggaagatataagatatgttattcttcaaataagcagttaagtcagtctgtttcatggtacaaactaaaacccaagtgactggagttacagagttcaagtgtgagcctcttccttctcccctggcgctccgaggaagggctaggagttacagagagatgggatcatagtgaccaccaggagtttcatatgaaattgccccaaaatgggaaaggactccttccagagtgggaagggggtgggattatacagtgcccacctctactgaaaggacacttaacagtgtctggagactcgtttgattgacctaacagacaagctggtatggtatctagtagaaggaggagatgcttgcaaacacagtcaccacccccattctagcacacagaagactctcagccaaaatgctaacggtgtcacctacagaagtccccattacagtagcatttattgaacctagttgtcccatttaataacaactactgtgcacagtgcagccatttttatccttgctttatggatagcattgacctttggcgtagcaactaggaaacttgcctttgcgtatgaatctggtctccgtagatatagggctttgatgtctggaagtccaacctctgcactgcagaggaagtgagctgcccaccacagtccaaattaatagggcaggcagccactccagagaggcgtcaggagacatgactcctaaatgtgcattggtttaatgactggagttctctcttaaggatcacatcctctgagtctattttaaaacgggatttgtcatgttggttccttagccaggcagatatcccttggccacaacaagcaaaatccctgggctttgtctgtgcacctgtgagtcttattcctataaatacctcaaccctattgggccagcgggctaggcctccaaataggcaaccagaatcacaccccgcccttgtctcctccacattcctgcccgtagttatttatagccacatgtagaaatggatccacctatttcttgtttgggagaataacagaggctggaaaggaataggaagggaaactgaatctttatccccgtgtttcccaaccttcctactgactgctgtaaccctttaatacactatctcgtgttgtggtgaaccccagccataagttatttcattgctacatcatatctgtaattctgctgctgtagtgtaaatatctgatatgtaggatagctgataggtgaccccgaagggggttgtgacccacaggttgagaactgctgctttatcctgttatgattctagttcacggtcaatttgtaagcctctccctcctatagattcccaggttcttgccagctctggccccagatcattagcagcaagtgaggactttttgagacatactagcctcagcatctgtctgtcagagagctgatgtctaagctgaggtgtgtgctatgggcgtagaatatcacagtgactacggtatagcgcctggcatcttacagatacggtgctgttctagaaagactggaagatggcctcgggtcccaggagggtatagagatcactaagtggtctttactctgtgcctgaagtgacatctatctactacagccccaaactgtctctggatccttggaagtccttagctgaagtagattcctctcaagacacacaccaaatgagttaatttcccccaaagccttgaaaattctcctccaaacactgtgtgtaaagaagggaaatctctcttttccgtgtttctttcctgacttaagaggaagaagttctaaatcttcgccgagctttgagggaaactttttaattacctcattaatgacctgacttgatgatggattttgtgtctttaaacagtgtttctgcttcgtggacctcttaaaaaatgtgaaagctcacttcttacacattttaaagttgacatctgtaatttatcagtagtaataataattgagtaatttagtccaatagttgcaaaagctggctaactttatgttgagtgatgcttgtgtatttcaaacctagttcagaaagtacccaatatgacaggtaggctagtcccatgattgcagacaccacttattttgaggaaaatatctactataaattgaattagcaaagccattctttattgttaaactaattgaccatgtcggagttattttctggaagaagattcctgacttcatcttttaaagcaagtacaaagaaaaatcaagaggatgcaaaattattattgatctgtgaggttgtcacctcagtaaaatgaggtgtgttctctttgtttcccgttggcccttcatttttccttataggtgagaatcaggctaagaagggctccttctttggaaagcccgaggctccaggaagcaggcactgttctctggcacagcggcgatcccacgggaggatctaggtggtctggttttgtccttagtcaggtggcctggaaattttgtgtacgtccccagggtatgcatgttcctgttcaaagaattctgctgtcagagggaagggtaagaaaaataatttaaaatgacttagttcattctcttttctcaagcttctagtctcctcgtctcattcatatgtgatcatgcaagtgaggagaggacagacccaggactatgctcatggcaaatatacttcaggttgtgtttgcttgaaattcacagccctggtgctgtaccttccaagaggctgtggaggaggggaggcagcatggtcagctagggttccctgaagacgatagtatgtcctcaagactgtgaactgtcagtgcccagctaactgggttcatgttccggctgctgccctcctgttcagtagcccacagaaggcctccctcttacccttctccgggcagtgctggcccccgtgagtgagctacatgggaacttacattccttgcggtcttgaggctctccctgtagctcagctggactctctcccctgcaaactgatggagtccactggccagagatgtgactgcagccaaaacatgaccagaggagaaaagagacctagaaggatctacctaggatgccaaagctcatattacaaagcttgtttcgtagagccctgaggaaaagcgaattagtgtccttgcataaacctctgtgagtctaacttagcgtcctcagtcatgaaatacccaaggatgaatgaacaccctgcccgcactcaagctactatgtcatacacagtttctggctcgcagttctccatatgtccaaaccatttggccagccagaaaacaagatggctcattggcatctcgtgcactgactgtgaggaagggcctttagtgtcaagcacgggaatgaagcaaaatagtaaatgatactgaacccatcatatgcttttgttcattatcccctcaattcatactgcttcctgacccttcgttgtttactttcgctattcgctattagttacccacagttattctattccttggtactgaagtgaagagacaagacccagaattctcctttccttactcttacatacccaatatttaaactggcttccaaattatactttaaaacttcccaagtgaagtttgagaccagtaccctgagaaggtcatactaaaattgaagacaaacagaacctcagcactctacgtccatagtcagtcagtcagtcacagtgtgagagtatgcagcaacacactgtcatttagccataagggtcagcatccgaggggtggctttgtaacaggtagagcttgcagaaattttcaccttgttttctgcaggttgtattctttgaaggttttttggttttttgtttgtttggttttgttttttgttttgatcttgctctacacggaggtactgagggaaggatgtaagcgcagagctcagacatctctgcactgtgttccacaaggaaaactagctttatagaaagtgtctcccaccaggaaccatgtgccactagatagcagtgaagcagatactccagtgaactgtgaagccagactgtccccccagatcacagaaggagacagagttctcctccctcggaaaagatgcacagttatagattatagttatgaacagttatcagtagattatagttagtgttccttggccttgcctgattaaaaaaacaaaacaaaacaaaaaaacttgtcttcacaaacagggacagggttataaggaccatcgagtcttggtttcccagatagctgtctgggcaatggggagagagacgccgccatactttcctatggtgtagactactacctcttgtcttccatattgcgtatgccagagtgaggatgggagcatcggtcttagaggattagtcacaagtggggacaaggctccagctttaatcaactgcctcaacctgttgcagcccagggggggtgcgtaccaagccttccgttcctggaagacttaaacattcctcagctgctctcaataccagcccaccttcccagaatgccgttcctgaccgtcatctcctgtttaatgtccccactgcctcccctcacataaacaagcctcatgacgcctttgggactctgccgaatagatctgatggtcaacttgatacaacccagaacccccacagaggagagtcttcgtgggaagttgtttggatgaagttgtcttatgggaacatcttgggggaaggaagtgtgctggcaagtgatgtaggaaaaccccacctactcttcgcagcactagtccgtggcaagagtcccgcaaatgctcaaagacatgtctcccctacagttattctggcccgtggcagaacagagtattctagggattccacaacaggccatgcagcctgtcacagcactgtcacagcactgtcagagcggtggttcttatgggccatgaccgctttgaggtcgaccaactctttgacagggatcaccaaagaccatcagagaaggatttacgttatgattcatggcaaaaatacagttatgaactagcaaggaaagtaatggtgtggttgggggtcatcccggcatgaggaactgtattaaagggtcacagcattaggaagggtgaggactgctgtgttacaaagaggctacagggtgcgtggatctgtacacagagtggcactggccatgtgggttgtcctactcaaagtgatgagagatatggtatcctctgtctgagagggatgaggagatgttttgagcttagaagtactgtcccataaggggtttggtcctcagagtctgcccagcatccacaccctccagttgacttcatattgaattctgattaccaattgcttatattgtaaggatattgttcctgtgtccctctgctgaccctgcatctggagtgcactcagtgtttaaggggagagcaagtgagtactctctagtcacctccagccacccaccggagcatagagggcattagggatatcatttccctggtctcagagctgagaaccctgagcagctgggacctcatttgagcccatgaagacccagcgcatactggcctagttatgtccctggactgcatccagactgcaacggcagggctgctcgtctgccggcacagttgttgcttgctccatctacctctctgtgccttctgtttgtgttttcaagaaaagcattccttaaaatagatgttcttcctgatggcgggagagctggtgtggggcggccatgccacctccccgactgctttcactggagcctgttcaagtcctgggagtttgctgtgagactgtgttgacatgggggcctagtttgttgtcacaaataggatgtctccaggatgcaccttcctctgtttcagtgggtgacaaatttcaaccctaccaaccaaagttgagaggccaggagccagcagtatgggagccacttaagtcgccgtgtgtgtgtgtgtgtgtgtgtgtgtgtgtgtgtgtgtctgtctgtctgtctgtctgtctgtctgcctgcctgcctgcctgtgtctgtacatgtcagcacagtgttctcccacttcacacccatgtgtgtgtgtgtgtgtgtgtgtgtgtgtctgtgtctgtctgtctgtctgtgtctgtacatgtcagcacagtgttctcccacttcacacccgtgtgtgtgtgtgtgtgtgtgtgtgtgtctgtctgtctgcctgcctgcctgtgtctgtacatgtcagcacagtgttctcccactttacacccgtgtgtgtgtgtgtgtgtgtgtgtgtgtctgtctgtctgtctgtctgtctgtctgtctgcctgtgtctgtacatgtcagcacagtgttctcccacttcacacccgtgtgtgtgtgtgtgtgtgtgtgtgtgtgtgtgtgtgtgtgtgtgtctgtctgtctgtctgtctgcctgcctgtgtctgtacatgtcagcacagtgttctcccactttacacccatgtgtgtgtgtgtgtgtgtgtgtgtgtgttctcacacatataaagtgaattggaataggagcacagggattcaggaatttcactgtggcactttttctttgattttagtggagcaccatatgaccatcactctatgaagttaacactttaaagcatttctccttaaagccagaggccccaggtgctgaaatgtgggcctatgggatatgggcagcggtgaaggagtcccttgcaacatggagtatggggagaaataagagcgaccatacagcatgcagtggaggtgcaatgggggctagtgcaggatggcatggttggggcacagtggggctcatgcagtatggggtatggacagaggtgaaggcaaccttgtgtagaggagccctagggggaggggcagtagggtttgaagtgcagggggcttctatagtgcattcttggaggtggtataatagaacttgtgcagtgtggactactatggaggcccgtaacaggttcatgggatgcaggtacagtgagtttcatgcagtgcgggctataccaacttttaaataagtcctggagatccaagctcacttcccaggcttgcaatagcaagcactttacctgctaaaccatcccttcagctcctataagctcatgttaatcccagctcagtccatgtgtacacattacttacacatgtaatggaaaactgttcttcaaaacactgtattacctgccaggcactggtactttcatttatttaccattttccaatgagggctgcagtgtagctcagagttggagacttgcattgcatgcatgaggtcttggatttgattcccagcaccaggagggggaattttaaatcttaccaatgactaccggcatatgtagctatgagggtgtataggattatttctaataattgctgatccttgtaatatgtcttgccttagagactcaatgtggtccctgggaacccacccttcctggttcccaattactcttattccccagtagtcccctgccccactcctcagttttgtgggccaggttcacacagactcagttctcaaggaacatgcccactccaaagtctacaccgtctcctggtctgtgggtcagagcatcccttgcaggtgggtgctttagtgactttggatttcaccctgcagagaaactgagtctcacatattttaaagacaaataagcccgtgttcactgcaaggttgccatctctaaccagtgtgtgcaggacactggggtctccagtagggtttcactggagctgtggttataaacctggcctgaccgtgatggcatccaaaacccatggaagcatacctacatatgtgcataacgtaacataaatacagcgcacatttgctttaaaggctcataatgcgcatcctttaaaggggcaaagtggtataggagacagggcgggaagatctcaagttggaggctagcctggggtatataaatttgcctggctcaaaaaggcaaaagaggcagggaataagctgaatgaatgaatgaatgaatgaatgagggaggagaggtggtcctgaattgacttcatcannnnnnnnnnnnnnnnnnnngatgttctttactggcttgcctcacctggcttgctcagcctgctctcttatagaacccaagactaccagcccagagatggtcccacccacaagaggcctttcccccttgatcactaattgagaaaatgccttacagttggatctcatggaggcatttcctcaactgaagctcctttctctatgataactccagctgtgtcaagttgacacaaaactagccagtacagcatccaaaacccatgggaagcatacctacatatgtgcataacgtaacataaatacagcgcacatttgctttaaaggctcataatgcgcatcctttaaaggggcaaagtggtataggagacagggcgggaagatctcaagttggaggctagcctggggtatataaatttgcctggctcaaaaaggcaaaagaggcagggaataagctgaatgaatgaatgaatgaatgaatgagggaggagaggtggtcctgaattgacttcatcagtgtttaatgagtgagcactaaggtctctatatttattcacttttccaatggtgtaattaaaactttcttttacctggcatgcctgtcttagaggctccagtgaacattctcactgtggaaaagagcataagtaattttgttactcacctgcatgtcttcaccctgggggtggggggtgggggaatgagtaatatttgttgaaatggataccattactacctctacagatagtcgcaagaaacaccaggtttgcgtgagtggcagtttgggttttgtagcttattgtagtcagcatgtttgatggaagtggttttgtgttgcagattactaaaaaatgactaacctttttatatgatggctttaagaggtcactctgtggcagtgacggccacagactgtctttgtcggcgtctagtcaggagcctctacatgtcatccatccctgatttctgtctgtcacaaacgcgtgacagaagtgcctttgcgtgctgtacacctctaaaatcaaggcctccaggggccttactcacctcttcctgcttcttctgtgacatcttgtgttggggtgacagactggcctgactgaggctctggattagtctccaacacttaaactaatcaatcaatcaatcaatcaatcaatcatcatcatcactcagctgccagaactctccttggtttgggaatgttttgagacctgaatttctcatacaaacacatcttcattgacagatgaaatactggtttaaagtccatttattctgaccatacactttctcacacttgatctctgttttatttcaaagcttgttttccacttccaactctcctggtgtaaatcagtaaaatcctccagtttccttccttgatgaagcatctttatctttgggtgtttgagaaacattgttgccatgccaggaggaaacctgaccacagggtagcagattcccccagcatggcccgccttggagaattcagtaaacaaattgataatgaggtagcatgaaatggggcatcaacagaaaccccaaaagtcattccaaatcatatcaccataacagtcccacaactgggatgcatcatcagaagagaagcatccaaagagttggtatgcacttgtcttgctctccagcacttactcagatgcacagagtgtaggttggggcgggctcggagaccactgcccaggcaggaactccatcatctggctggtcatacagcactcgggtgcaagtgcctgcttctgctgcttgctacctaagcacaaaacagcctgtgttggacgcacatctttgcaatgtttgctgccattgctgcctgggcttggctagagctgagctcatgtaggtagtttgaaactaatgtctttccagcaaaacatcaggagcacataaagatggatcctgaatttttgctaaactttattcaagctcacaattcatgagttgtctcttagatacccctgtcccctgatgagtgtgcactgtgtccttcaagtatcagtagttgggagagaggaagccacaaatggtactactgctcttctcacgtgcgcaattatggatgatagtcaacagatctattttgtttgcttggttgttgtttgttaactgatatttatacagctctggaatgtataatgtcaaccaagtagaggacagatgagcctgctccagagttccttatacgactgtcgttggtgtgcgtcagggtggctgtagatgcgactgtaagctaggcagaagtactgacatcatttttcaggccttctgctgactgctgtttcccagtgcagagtgtgtcagccagcaactcccttctagccttttgctggacaaggatcccgtgttggattgtagctgagaaaatgcaagaacccccaaattcctcaaaagtatttgtagctggggtgctggctcagtcggtagcatgtttgtcacgtgaatgaggacctgagttcaagccccagagccaatgtatctgtcgatcctgtaatcccagcactgggtaatcagggacaggtggatctgtaggactttgtggccggccagcctagcatgcatggtgagctctgtggcaatgagagaccctgtctcaaagaacgggacatcccgaggaatgacacctccagtatctctgtcccaagctgagcatgtgcgtgcacacaaatgcagagcgcgcatgcatacgcggatctgcagacattgaggtgactcgttctccaggcacatctgtccaatgctgagtttccattatctgtcatgcatcctttggaggagagacaagctggctctccagttaatcacatctttaatctatctagaaggaaagacccaaacttggaatacattatttctataaaccttgttcgtgtttacctgccgttctactgaatgggaaaagataaagtgatatctgtaaacgggaatatttcttagtaaaccaacccagtgcagataagggtttctaggtctccctgttttgttttggaggttttatttttgttttgttttgttttgttttgtttttttcagatagctgtgggaagggtttgatcctatgcaaagaattttccagcgttcatatgttttcatgaagtagaaataactgtgcgctagaggggggaggcggttgttttgatctgatgtgtgccccctgatttgtggtcctctgaacaccagaggccaagacaggtgctctaactgcaggacgtgtatgcgcctgctgttggacacactagtctggagccctgagctctgacttcctgggtgactcccaaagcctaagacaagaccagtgagtcccataaccaactccacactggtcccatttaagacatgaagaagcatgctatatggtaggtcaagagagcaaggaacacagcatatccaaaattacagacttcctccccagacatggattctccagtagcatacttactggatagaagggggggggggagaataacacttctttccctttttacaacctgcagtttataagatgtattagcagctaagccatgcttcttcaggctctgagctctcgggaagctcttgagtttatggcaggataagtacgtgttgaaatgttccaaacatttctgtcctgccttctttttttaatctgtgtccaactctgcccaaaccctaaatggccttatatgttcctcttccctgactggccacacgctcccagctctacaagaggattccttacccttcttttgggggggtaggcacagagtatcagtcacttaaaggccagatgttggagctgcacttccagggctgctggtgacagcctggagcctcatcctggccgtctgcctccatcccgcccccttcctgctgcacccataccaggttctgcatcactctcttctctgctgtaggacagttttacagaacttcgggccctcgggtacagatggcaacattaacactttgctttcttcttcacagacacgagacgacttcctgggccaggtggacgtgcctcttagtcaccttccggtaaggacggttcccgactctgggttgcatgctgggattgggggcttcagggctttacagcgcgtgtctgtagagtatgacagacatgacaaaggggctgagacagggagtgtgtgctcgggccatggctcttgctagacagcgtccctctggaggggtcggatagaggtcaatttagctgtcaaagtctccatctgagtcacatggctgctcttgttagcatctctggctcacctcccttatttctctactcctccacctttagccattgccccttatggaatagctatggtctcctgtccaggttcatcttaagggcttggtttttgtttccgtgtagtctttggtatagcttggtggtctttcccctttggttaaaatcgttacacctgtacaggctgccgcttcccagcctgtatgtttatgactttccaattggttggagatggaaaagaagattctgttggttgtaagtgtgcctgttcactgacggtgccaccctcacctcagaatgttccaggttagcctctgcgtctccgcctcccttcctccctgctcagtgagaagacggagggggctgtggactgtgactgcagtttgggggagtcacctgcaccctgtgtcagtgtaaatagatggctcatataccagctgccattcctaagactgttccgtcccccccccacacacacacaccctgccacctctcctccccacccacccctcaccccccaagcagctcaaagtgtcataagtaacagctatgagaggagaatcaaatacttctgccttacaagggcatcgtgtgtttcaacccttgtgtgagcacgtagcataaatagtctataaactaaagtgactgggaggagccagtacaaacctggtgtgtggaaaccggggctgtttccgatggcgagtgctaggaaagggaggctctgcagatgtaccatgaaggaatgcagtggcaagccatgatgtcactctctcttgagatgtcagctaaggaagagtcttcaagaagcaagcacattaagatacctgtgtttctatgtacagagctgaaccccaggtaccctatggttgtactgcgtaatgcttctatgagaaccacatccgaaacctagaattttttttacacaagggagggggcatgagtacatacccacagatgcagggacaaggtgtccagctcccttggagctcctgtgagccaccccatgtgggtgctgagatatggactttagatatggacgtcctgatagcgcaggaagcaccctgaaccactgagctatctctccagccccaaacaggatgattcttttcaggcctcactgagcatctctgagcgtctcaaaagctgcacagaaaactgtcttagttagggttactgtggctgtgctgaaacaccatgaccaaagcaacttggggaggaaagggtttattcggcttatgcctccacatcacagttcatcatcagaggaagtcaggacaggaattcaagcagggcaggaacctagagccacaaaagggtgctgcttactggcagctcctcctggcttgctcagcctgctttcttacagaaaccaggaccaccagctcagggatggctccacccacagtggtctgggccctcccccccatcaattgctatctaagaaaatggtcccagaggcttgtctccagcttgatctcatggaggcattttctcaattgaagctccctcttctctgataattccaaaaggcttcaggcattcctgactctgtgggcttccctgttgtgttcttcaggttaaaactggaaagtcatgctttgagacaacgttaatcagttggccatttttcatgtggcggtccccagacactctcttccctacagtaagaaccatgcatttgtcaagggaagatattgactcatagtctttaggagtcataagtgaggagctggagagatggcttagcagtttagagcatttgctgtgttcttccagacaacctgagttcagaatgcatcacccacgtccaatggctcactgacacctcaagtccaactccaagggtcctgagatcttctgggctctgcaggcactcgcacatagcacagatacgtctacatgcacagacacaggcacagacacatcaacatgtgcagacacagatacatgcacatgcatagacacagacacatgcacagacacatgcatagacacagacacatgtacagacacatgcatagacagacacagacacatgtatagacacagagatacctggttttggtttttggttttttgcttgtttgtttgtttgttttacatccttaaaagttaaaaagaaatgctgagagtggaggcacagtctgtaatcccagcacttgagaggcagaggcaggtcatctcttcaagttcgaagccaggcaggactctgacacccccacctaaaaaaacaaaaacaaaaacaaaaaacaaaaagagccataagtgaaagttccaccgccttcctccaggatgccctcttttgtgtgatttaggggtggctggtataaaaggcgtcatgcttccagtgaatagaggtgtgttctttacagaccaattcagtacagggaataactgggctttgggattctgagtggtaacccgggtaaactttcaaagaagtcagtgccgtcaaggcccaacatgagaatagaaaccagctcattaagaagatcactgtgtgagcaaaatatattccatgaatatatgaatatatgaaaagggcacagtggaagtcattatttcatataattaacatatactgagatttttatttttttagttttaagatcccacagaataaacaggacattcttctggttatggaaaggcccagagagaagcctaagttatagcaccatagcccaataaagcagtggttctcaacttcctgcactgcgaaccccccacccataacattatttcccgtgctatctcacaactgtcattttgctactgttatgaattataatgcaaatatctgtgttttcgatggactcgggccacccatgtgagctacctccaaggatatggacttcagtagaaagaagaaggggggaggtgaaggtagatcccttgtgctccgtgtggtagtagaagcagttaattctgcatgtacttggccatgagaccctggatttgaagctattacatgtatatttggcagtgtgtttaagacacttgtgggaaaattgcaccagggttcgttctgtgtgctaaggcaagcttagaatgtgttgttcgtgttcactctatttggtggcgtttcatcttgacagctacatagccattgctattgaaaaggtatcagctcaggacccccaagataagttctcagcacaaagacgatttattggcctcagagggacagaggacagggataagggataaagacaggagatagaggaaaagggagaaaggtgggacggggaaaagggagcaagggagatggggaagggtatttgcaatgaggggaacaggaccaaggactgcctctggataaggaagagacaaacatggcacataggaaaaatggcagtttataaaggtacaagggtccccccatgtcaggatgaggtgtttaattttaattggacatgttaattagggtagccaaagggggctttcaattgctggacttgaatgttttgatagctgggccttggtggtcatccccaggaggaggaagtcaacaaacttgggaatagaccctggtggctagctttaggtatgtaatctaacagattttagcaaggcagggggagaaggggaggaagaagggcaaggcctgccagagccatgctcaccatgcgcaagctggctagagtcccttccactgtggttagactctatgtagcctacagatgcaacagttgtcagaagcatccccttttaggtaagagaagataagaagatgaaaaatcttttagtcgacctaatggggctaagagatggctcggtggttcagagtatttgctgttcttatgaaggaacttatgttcccagcacccacatcaagtgcctcacaacagcctacaatgctgacttgagagactacaagcccctcttctggcctcggtgcacacccatgtgcacatacaggcagaaatgtttacacaatggagaagatccatggagatctggagtgtggggacagtggccctggcagccacccctcctggcctttttaaggactaaggagcctgactaagtatatggctattaattgacaatctagctgcattagcggctggagaattcattccctgaatgaatatttactggtaggagggattctggtcttggtaagtgcgtcagcaaagccaattctctcttgtggagctcagtgctggttttatggcagccacataccagtgtttgaaatgccaccagtgtggtgacagaacccacttacaagtatttgttattttcattaaggtttaaatgtaagccactttggcaagcggctattaataccagatgacactttcaaaaattagaccagaattccctcctttgggtccaacgtggttctcatttgctttttccctagatccatactccgctaccagggcatccgtgggctagggatcctaaaacccattggaaagccttgtcagtttctttcttcccctcttgctcacaccatttctctgtaattccgcacataattataccaaggtatttaatttcaattatgataaaagccttcagaattaagatcatagaaataaaaataaattggttttttttccaaatccaaattgacggactacttaattacctgttcctccatgttaacatatatatatatatatatatatatatatatatatatatatatattcagcttttaaaacactattattatgctctctttatttttcattgtgcttggtgctacatgcttctgccatggcacttaaatggaggtcggaggataacccagaagaacagcctctctctctacatattggccatggggttgatctgaggcgatcaggcttggtagcatgtgcctccacccactgcgccatcttgcacatcctattaagatatctgatgtacttggagtggtgtagtccctcctatactttactgctctctccttttccctcctgtgagttagcccctgttttcctcctagacaccacagtgagagaaaatatgcagtgtttgcctgaggtttgattcaatagacttcaaaccaaattaatcagaaacaataaaagtgatttcatgctgattaagtatattccttaggactgtatttcaaactagtgatgagctgctgtcttgttaattaggatagtacatctttattctttaaggaagcgttgtctcaggcttctttctgatgcccagcgtggcagaaagctctttggaaatcagggatttgatggccagggggaaggagaagtgaccttggtgtagatggctgtgaacttgctttaaataacttgaatgccccattttgtgtacttaatgtgtgtggttttgagagagagatactatagacctaccagctgaagcccctttcctcaccgacagccagtcacagctgttcctagcagataccggcacttgcaatatcaaactttgcctttagagtctcaggttcgctttgctgagcattttcctgtgtccatttgccacataagttccctgacccagagaaacccctcaccctcactcccacccccctgcccacagggtaatttagaggaccagtgtatctcctctgctgatgtacaagctcggagttacaaacttcagcttcgtggaacccacatctctgccacagtccattgccaatacctgagcacaaggattaattaagcagtgtagtgggccaggtggctgttatgtgtaagaccaaattggcagcctgccgggaggaaagtgcatgcacgctgggagccaagaggtgggcagaggagatggagacaaagctgctttgcgtggtgggtggtcactgcctgctagcccaaagcaggcgagggaggcagtgacagtagcaatccaatcacctcctttgatcatggattcctccaccctttgtactcaaaacaaagtaattttagaatcctgattcactttctgtcctggctgtagtcgcacttcccaggtttcagttgtgtagggacaaggaacggacgggaactgtggtttgagctgtgggggcagctgggacatctgcttccttctctccaattcctgactgtttatcttcagtatttattttcccctttattgccctttgaggaaaagactgaggcagagcaaatgtggggagtgaacatttatgtaggacagagagctaaaggaaacagccagagctctaagacattgccaaaggaccggctttaaaagatgaaaatctgcctgtcagatgtggtcaccttccatctgaagatgggggaattctctaaggttcctttctgggcccctgctttttcctacacgaggagagtgccctcagcggcaaggccaggttgcatcaaagcagttccagtgttccctgagcagaggctctgaggccttggtgacacacttgttacctaggagatgcaggctggcagcaggacggaggcctgcagaggagatgagaggctgtaaatgagaacagtcctttcgcctaccagctgctcacaggcacagccctgccagtgggcttcctgctgtcctcacagggccacaggaacagccttggctgtggccacgtatgattgctggtcctttgaaacgtctcttttcagacccgtttgctacatgccgtccatgattgaaactgggcatagtgtatcttccaccttctgattaggggtaaaaataacttgaaggcatccctgataacaggatgaagttctgacaggtgttctcccgttgcaccctggaaccttctcccgcctcttcccttctatgcctccctgacgcccccacagctcttaatgttctcatggctgccagttccggattctctggatccttgggcagtcattgcactgggtagagagacgctgttatggaaatgtaaatgtctccatctcagacacggttgtatccgtgcagcatgggctgactgctttcctagcgtggagcatgttcaggagagtggaccctaaggcagtctaggtggtagacgttcttatgttcatagccgcgggcagggtaacgatgctttctcgggtgtgcccatctcttcctgatctcttcttcaataccatctcttcctgagggcattttctaggtgaggaagcctgggtccagaggagggtgatttatcctagcaggcgacattgctgggcctgctactgattcttcagtactgaggtgtgcctacaccatggccaacagagtcaggaggagcctgaggctggggagtggccagtgggttttttaaggctgggcctttggcaactttctcctacatttgccttccagatggtttattttcaccacctatcatagagacaaggattctgcaaaaatagccattccctttaagacaacagcactgtccacaaaagtgcccctccctcccccgggtcccatagtgcagcatgcttcaagtcaactctctgcatctttctctgttgtggtctactttttgaggaagcgggggcgggggaaggaggcacttacttaaagatgttagggagagggaaactcaacaatgtctgtggaagaaaggaaactctagtcaagtgtgagtctcttctccagtctggaattcaccactgccttctctttggggaacactgcctttaaggtgaaaggttagtgttagagcaactgttctcaaccttcccaatgctgcaaccctttagtacattttctcacgtggtggtgacccccccccaaccataaaattagttttgttgctacttcataactgtaattttgctactgttacaaattgttatttacttatggtgacctctatggaggggaatgggggtagaggttaaatgacccccagggtaagaaatgctgggttagaggattttccacaaagagtattttgcacctgccttttgttgcgtggcattcattgagtctgcagcacctcaggtggagctggtccacgatgacagtggccaggactgtgcctggcaccttgtgtgggctgtgtgtagagcaccgtcttatctgattagtttaatcctcacaattcaggaagccctcgttgctacagacaaggacaccagagcccacagacagacagaaggaccacccagccctataaagtagtgaagacagaacatagacttggggtctgcttcttgctctatgagttttcttgctcgatatgtgaacagaagagtgttcagagccctctagtactcctcagctcctcaccgatgcccaccaacagccctgcaggctgttagtcttttccctctatcgttgaatttgttctctatccaaggctaggtgctgtggcagcccctcccgcatccctacaaccctcaggccaggcactccgatgccaccagtcttttccttgatgttgactaaaattactaaaaaccaacaattgtcggcattggtattctttctcaatagtttattattattattaatttgtgtatgtgtatatggacatgtgcatgcagaggtgaaagaacaagcttttagagttggttcttcactcccatcaagtgcattcctgagatttaaggtcttcaggcttggcagcaagcacccttgttgaaccatgtcactggccccaataataacatttcctgattaccaaggtttacatggtaagtaatagctattagaaattttatatagaaaataatcctcagatgtctaagagaatataataattgagtttttaagtgaaagttaatttttagggttcagtttttatagatcaaatgggtttatcaactatctaagcgcgtacctgctttcttttctccagccatcagtggtgagaaagttcaagttctgagctcattgcttcacttcctagaagctcaggagaaccacccggagctgactgatgtcaggcaggaggatccgtcagttcacgggcttcctgtcagggttagaatgacctatctgttcatgagatggctaaggcttcgagcatgaaccattgtcagggagatcgtcacagtggggtgaagatataaaacctagtcacatgggcgcaggaaggaattttcatatcactggggtaagaacagggcaaagtttgctgatagctcagaaggttgaagtgaaaactaaagtccccgagttcagtccccagagcccacatgaaaacagcgtcttccagagcccacaggactgacacaggcaggaactcacagagacagtgtgcataaagctgcacaagttcggggagggagggggggtggaatccccagcatggagaaggggacgtagacggagccctgtctctctccaagaagctgcatgcagttgatgccttctgggaaagagaaaaccaactttctccaatggagcaacgttgagtacatcaactgcactccagggcaggccccttgctgggaggagctagccaacacaaaacagatcccctgtttgtgtatgtgtgtgcgcgagttttggttcggtttggtttaatttgttatatttttatctttggggtttgttttgattttaggggtttcttaagagaggcagaatttgaagttgggtgtgtagggacatagtctctaggaggacttagttgggggcaggaaaggatatgatcaaaatatattgtttgagaaaacatataaagccaataaatgaaaaggcattatggtgtgtacatatgaatataatcgtatgccttacaattctagcagtgagggccgggcagtggtggctcatgcctttaatcccagcacttgggaggcagaggcaggcagatttctgagttcgaggccagcctgatctacaggacagccatggctatacagagaaaccctgtcttgaaaagcaaaaaaacaaaaaacaaacaattctagcaatgaggaagcaggcacaggaagataccctcacccccttaccctgggtttctgatcagccacactagcctaatcaatgagtatcagttcattgagagaagaaaaagaaggtgaccagtgcgtaaggttgtcctttggccagcgcacagtaggtacatgcacgccaggaaaagggggtgggggtggggaataagagaatccgaagccattaggaagaaaggatgtaaacagaattcaaatgtaaatacatactcttctcttcattctcttgacataatacatcattgtatgtggtttgcctctcttcctataaaagcaaatattttggattgcgtttaatttgacagatcaagtatttcaggtttgattacgtacaatgttttaaaaaataatggcacacatttcccccaatttcctgctttaatagccaaccaactttgcacattaaaatgaatcccaatgtcttaccaaatgagcacacatcccgtactattggtcgcttctctgttgctgtgataaacaagtgtggaccaaaagcaacttgggagggaaaggtttaatatggagggaagccagggcaggaactgagagcaggaactgaagcggagaccttggaggaagccaccaaactaagtttcttatctaagccaagaccacctgcccagggtggcacttcccacagtaggctggtacttcccacatcaaccattaattaaagaaatctcgggcagacctgccaaaaagctgatgtgatggggtgatccctcgctcagggtttccaatttccagatggttctagtttgtgtcaagttgacaagctaaggaacacagcccagtttcactcacagcttcatggaagagcccagtgggaggagtgagggctccctggatgctttgcatgggagatagtatcacctcaccttaggctgatgacttcatctttcaatgtgaggcatgcagctgcaccccaaggccaggccttgcattctgctaactctgtgtttaggtttcttcagtcccagggataatgaggcaccactgaccgatggttttccaaagttaatcgactctgggagattgaggccataccctgcagttagaaattacacttggctgtggtggctataattttgtcatttgtctctggctgggcttgactactagaacctgatgtagatagtgacatctagtggatcttaagtagacaagcttctgtgggcctggaaggtgtttaattaattggctaagtgcctgttgaggaaccagctctttttacccttggcatgtcctaaaaatatatccttcatattcctgatgagagtgtcaaaaatatgaaattgttatgaatgttgcttttctgctaattggtttttcttcccctagacagaagatccaaccatggagagaccctatacatttaaggattttctcctgcgacctagaaggtgaggcttggggtaggtgtaggggtgaggctggtgggtgggtataggggtgagttttgtgggtggttgtagggctgaggcttgctagtgggtataggtgtgagcattgtgggtaggtgtagggaaaaagggttgtggatggctgtaaggttgagttttgtgaatggttatgggggtgaggattgtggctaggtgtaggggtgaggcttgtggctaggtgtaggggtgagtgtttgtagtgctgctttctctgaggacagtttcagcaaacaccttaaaggatggaagcaagccatatcctttacaactggttctcttcctgtatgcagtcataaatctcgagtcaaggggtttttgaggttgaaaatggcctacatgccgaaaaacggaggtcaggatgaagaaaacagcgagcagagggatgacatggaggtaagagagacagctgcaggccctgggctcttcctggctgcccagcttacctgaatgtcgttctgagactctgtcatcggaggaagtggatgtgtgtaaacttaaatatgaattcacgtccatagaccctgagtttgcctttggaagtcctccagtatgtgactgttgcagccaaagtgaaattcccattttcctgtcacaacaccaataacagggcaggcagctcttcacacggtccttttagttatttgtccggctgctgttacaaaatacccctccaaagccactcaagggaagcacagctcacgtttcgagccaacagagtccagcgtggtggggagggtgtggaagtcagatcgtgaggcagctggccagactatgtcagttaggaggcagaaagtggacaggaacaggattcagctgtgaatagacaaggcccaccctcggtgactccagcaagactccaccttctaaaggttccctaaccttcccaagcagcagcagtggaatgccgggtgttcaaacacatgagcctaaggagggcatttcacagccgcataagggcatcttccatggcaaccccactgccagaaaccccgtgcccattattgctttggattctcagttcttttttaggttccttttagcacttgacattgctctagagtgaatagggttatttagaaactctatccctatctctgatccatttagtccacaattaacagcgcataatgcagagtcctccttgggaaatgccagtttgcagttagctatccaaaagaatgttctctgcacccttcctgacatagtgggcttttcactttctggtcacgtgtctgtacctaccgtgggttccattgaactatctccgcatatgctgtagacagtgctgtttctgttagctcatttctcatattgttctgaaagcccccatagaagaagacctccctggctgttttcacatctgtttgcagctgttccacacgggggatacttgaatgatgcggggtggacaggttggccaaaccccctgcaaccaagaggccacctttccgggcagtgtttcactgtaggcctctacagctgtcgccaagtaacagggactgaagtgggtggtagaccaaagtagaggttgagatttcccaagcaaagcaacggattggtgtgtgaaatccaaggaattgtttactctcttcttgtctcccaagtgcagtaaccagtgattcggttgattttccgctggctttaccagggggatgttagggaagcaatacttaatgctgaagatatgtgtcggaacagtgtaactgatcctggcaccgtgcagtctctttgtgcagtgcctaagcaactgtggtagtttctagactcacaattgtaacacagaagtggggaatgacacagtcatctcctctcctaccagccccaggccatccttcttggagaccaatagccttttccctacacctatagcctagaccatgctttctcttcaaacacacatgcatacttcatggtggtgttgaaaggatgaaagccatagcagctctggtatgtcccatggcattggctttgtgcaaccctacctagaggtcattgagtcactgtaactaatggttgtataaaaattatcatgtgacttaagcaactaaacagggccggcgaagtggtacagtttgttagtgcaccttctgtcaaaactgattcgatctgtaaaatccacgtggtggaaggaaagaaccgaatcatgcaagttgtcctctgacctctacacgtgtgctgtgcatgcacacgtgggcttgcttgtcagcacacatactcaaataaattaatggtttttaaaatgcaaagaaggtaaatggagtatccagatgtggtgcagagatcttagaagctggcatggttaactggagcattgctcacatgagttttggaaccctgaattggtttctctcctggagaggaactctagctcagtgtgacacaggaaactgtcataagcctcagagtaagggagaggatgccacactgggattgtcttctcccgtgatctgaagcccagactcaggactccggttgactttactccacagcatggatgggaagtggttgactccaacgactcagcttcccagcaccaggaggagctcccccctcctcccctgccgccaggatgggaagagaaagtggacaatttaggccgaacttactatgtcaaccacaacaacaggagtactcagtggcaccgacccagcttgatgtgagtaccacagatggcagggatgctgtgcctcaccctgcacagcaatgggtggcagttccaggacaagtttgggagaaggagggagggagggagggagggagggagggagagagagagacagaggcacagagagagagacagagaagaggctgttgccttgtggcactatgattggagttattctgcgcctctcctaggattactgaggtgtgcgtttcctggattcttcattggcttgagtcaccttgcctccctcttcctctgctccctctcctgattgacccaggatggaaagccagaggcagactggcttgcttcaatgtctttaccttcttactctcttgcattacttgatgatgaaactcaccaaagcttcctttatgtttattttatttacttctcaaaaacatttgtgtatcgctgccttggcatatttagaaacgcacaggagatttacaaagtcaaaattagtaattactgtttatttccacatcctactagcttagagagagagagagcagggtggctgatgcctgttcccttagtaatttttgttctgatgatagcaaataaataaatcctagttaaacctcgattactgttttaaagaacgattttgaagtggctttttgttaaatcatagtaagcagcaaaacttaagtctctcaatgtgcagttagaggcagagccacactacccacgaggaaaggagtttccttggggattatgagctccagagaagccaaaacagcagaattaatattaacaagtagttattacgcatgatcatttctcagaatgcagccaaggcaggcgagtgggcttacgagtgatagtctaatctcttcaacccaaggcaaaaaaaaaagatctcccagtttctgctctttaggtaggtgatatccagagatgctagaggctgtcctcacaaatcctttatccttagaaggtttaaaggtattctctgtataattggggggagattcttggaactatgagctgttcttggccagtttgcactgcccagcatggccttagcttattgcttagacaggatgcacatagttttgttgggggtcttagatataagtgtttttgttgatactttaggtttatcactgtttgtccttctctgatattcactgcacttggaggtttgataagccatttttaagtatcgtaggtatttggagtagaagtgtctttggacctaccttgggcatggtctcatactgtcagcaaagcagctgcatccatctgaactaaacagcacaggagtacacccaaaggggctatgtggcaaattacgttgcagggtaatgttgcatggtggcccgcgccatgatctgagggaaaatgggtacagttgttactgaggtgattctgagacaacacttgccatgtatttaaagcacatcatctgtgaggctggctgacagtctcacaggtatgcacttaacccaaatctatcaagatgtcagttccgtaagtatggcttcttaggtgtgaagcagatctcaagagcaagggagcagtttgattggcaggagtcagtttccacagcctctgctttatcccctctgccgtttatggatttgaattatccctccttagcattgtctgacatgccaaggtcatttagagactttttatgtgtattctaattttacattttgtttaataataattgagcatttcttaaaaaggcaataaatgcatcatcatgaatacaatatagcatttttctaacagccgacagtgccattttttaatcatttttgtgctttcagaaacattattactatatatatgtgcttcttgattataatgattacatctataataatatcaattttctcaagatacttctatttagtatacacatttattctggttatatttaatgtagcaacatgttttgttaatgcaacaaatttatgtattgtacattcaaatataataaaatttatttaattcagattttagtaaataaagaattataatttacttgtggattaaataaaaactaactttcacagtacctcctgtagccctaaagttgatagtgcaaagatgtttgatagaaatagttgaatattcagactgttgtcctccgacactgtggcttgttgagtctagtggctatgcagaggcccagggggctctttatttgggatatgagtgagtttgaaagtactggaaactttaaatccttactttagaaagaatctatagctaggctgtctattaatagtatatctatcagttcaccggaactaaatttctcaaccattttggaacattaaccagcaactgaatttgcactcattagatgtggagtcagatcgagacgcgtttgcaagcgcctgggaaggacctttagatgtgtactccagacacgtagcagaaatttcccccaaaagaccgtcacctgtcatgtactgcaaaatagttttaacatacagtcaattcaatcatctttaaggataagttcttaactcggattctaacttaaaatctttagtcgacaatacaaatgagatgtgacagctccatgttcttattacaggcttgtttgggaagtcagcccctgctctgtactcggtattagaagcagggtgctggaaggtggttgcaatcttaagatgtgaggtttttgttaaaaggagacagaaagcagctaaaagtcaagtcacacaccacaggagatgtccccttgggaccacagcccttgaatttgtgccgttagtatccttcggtcaattactgatgacccagattagctgcttggtccctgctaggtaggcctagaagggacctgccgactgcctgtgtgagcttgcttgtcacttcctgccaaaggactggcttgtcacagactgaagggcctagatttctcttctcaaatactgaagcttcatctctgaacagccaaccctgtccccactgcctccacacctgtgggttcagctgaccatagaacataactatcggagacgtattaggcctgtactgaccctgagcagtagtctgtcttcgtcattccctagacagtgcaggataagttgtttgtggaagatttcctttgtgtgaagcattgtaagccatccagcggtgatttaaagtacaccagaatttgtgctgtgtgttctgttaaatcagccattctgttatagggatcgaacatgtaggatttgaagtctgggggatagggagggctctgcagccaatcccccgtggatgcaggaggatagctgtatatgtctgaaagatgctctaactcttgtacaatacactgaagctgttttggggggctagggtgagtgtcagtggggtctgtcctgaagatggaggaagacttctagtattggttgcttgttcctatcattgtttgacacagatgtcttagtcggtgcgtggaccacagtgagggttggactgtcagaggcatggctctgaataccccttctcttcttacatcccccccgccctcctttcagggatgtgtcctcggaatcagacaataacatcaggcagatcaaccaggaggctgcacaccgacgcttccgctctcggaggcacattagtgaagatttggagcctgaggcctctgaaggcggtggagaaggccctgaggtatgatgtccagagatgctgtcgaactaagtagctccatcttccaacgttccccagggtgattttgtaccttatttttttcccctctcggttaactgtgtattgcatgtgacgattgcagcctcatgactaactgatttcccacctgagtattagtgaacttagaaaacgcttgtgaaaccaacgtttgaccaaacccagtgactcgtagaaatatcaaggggagaacatgattctggtgtgaaggtcttatatgccaccccccccctgggcccccggggacctaaccaatctcatgacacaacactaaagttgtcattttgaggaatggagggagctcagtcacttgtctgggtctcatgggcaagtttctaatgagttgcttgacatcttgggagagattacccaaaaaatgtacaatctgagttgattggaatattgataactcttctctataaccagttagcaatgtgttactggaaaaaagagatgaagtaagcaacaagtcagaagtgatcttaacttgatgctgatgactggtccttggcttgacctcgtgttagaaaggtcattcacaaaaacctttcagtgaccagcattagaacagcaagctagtggtttcatagtagggccactgaacgttctgcagaactaagccattttaagaaagaaagaaagaaagaaagaaagaaagaaagaaagaaagaaagaaagaaagaaagaaaggaaggaaggaaggaaggaaggaaggaagaaaaaagaaagagagaaaggaaaactatatgagaattgcttgtaaattcttggggtgtttctaatccatttgtaacacaggctggcaaaaagctgccacggtggggtgggcgtgtatgttgacaggagtccatggcggggtgggcgtgtatgttgacaggagtccacgcgattgtggccactggacctgcctgccccctcacactatgttcacatctttatggactgctcacttcagaaatttgctcgctctgaagtttcctggcctgttcattggggcaaaggcccttgttgtccttgtgctgatcctgaagcgtttgtgtctcgtgctaagtaggggttaatcaagagtcttctactcccagtcagttctggccctccgaagagtttccctctttacctgaggcaattctatatgaaaattggccctggcaggttggggaaaacaaaaaagttgttcttttagaaagaagggggcgtgtcaccagccttttcttgtttgatggttatgaatgttgtgtgttttattagaaggtagacaggtaatttcccagatcctagcacttatcctagtgtctgattcctccatagccttgggagaccatttcagaggaaatgaacatggcaggagattctctcagcctggctctgcccccaccgcctgcctccccagtgtcccggaccagcccccaggagctgtcggaagaagtgagccgaaggttgcagatcactccggactccaacggggaacagttcagttctctgattgtaagtcatggtattgttagaaaagctggacaccggtggtcagtcctttgttgtagcttctgaggatgttcttctatgcagataataaccaaggccattggttcttgacctacaggtcatgacccatgtaggggtcaaactaccctttcacaggggccacatatcagaaatcccacctattggatatttacattatgattcataactgtagcaaaattatagttgtgtagtagcaacaaaataatttcatgttggggtcaccacagcatgaggaactgtgttaaagggcattgggaaagttgagcgctactggccaagagtgttctacttccagtcagttcaggctctccaaggaacttccgtctttacaagaaggaaatttagccctggcaggttaaaaatatatatatatatatattgctcttttagaaagaagtggcatgttaccagctttttcttgtttgtaaaaaattcaaaggaataagattctgtggattttgtaagttctagctttagccttgtaggatcttgttcctgtccaaagactcatgaaaacagtgtctctgccatgaggccatttcctggtgagaatccggagccccagagcctcccaaccagtcttgtaaactcccactctccacacctctaccttccatctcacaaacaaggagaacggatatttaagtgattgtccctggcaaagccctggcaaagcttgaccatgagatagaagaaaccccaaaaccgagcatatgaactcttaaggaaaaaaaaagtttgaaactgtgacccagacatcaagataacacttgacctgggtttctcggccctcagagaaatacttcctagagggttcagctcagtgagaaggaacaaggtcaatcacaaagaactttgcacgtaacactgcgcggcactgtggggggaagcccgccagtcattctcatgtacatacagaattaagaccacacgcacatgccatgtttctcaagaaattggacttaaagatgtactggtgagaatggtggttgtcactaggtgggagacggcatcctcacacgatagtcatggtgatgagcacacggatcgtaaaatgattggaggactccattgaacctaaaagccactacgtacaacaacattattagcccttcgattatggtgttctccttaaatgaagctattggcctctgctgcgtgagtgacagtgactgtgtgcttccacattaacgttctataaaagtctttcagaaagaggatcatcaccaggatggaaattcagtactaagcggatagagacgaggctgcatagatgagatatttgaattggtaccccaaaaaaagaaaaaagccctgttaccatggaaacagcatgagccacaaggccacatattttaaatgtattaaagaaaaaaattgcagaaattataggagccatataccatttatataaacctcgtgggaaagaaattcctagttttctatgtcgatatgaattggcatttgtcacgatgagagtagggagctctccaatgagagtagagtattgagtgcttccagaaaccaggcgcaacctgaagacccgagtgtgattgcatatatcccttggggaacttcctccagtcttgatgctcaaggctgctctgtattcaagagcagtgaggtgaatgctttcctcaggatgacccacactgcccagtgtgggaagacacaggtcacccctgacacctccacctagctttgcctgaccttaacttactgtttgttattatacaaagtcacgcatgttacaggctgtagcatggctaagcattcttctagctaggcggcttttttgcctgtgaccttctcgaatctttgttcagatccacaaggcaaacaagtagaaggaacattctgtgtggcacacaggattgtccttgggtgtgcctcgcttcttctccgctccacttctgttggaactggagtttcctccacttggaagctaaatacaacccctaaccctagcaggaaggatgggcagtgtctaagtgcgatggccacacagtttagctggtaaagagccaagtgtccctttttcttgccccccttttcctccattcttcacacttgagaatttgtccagagcttgtgtcccaggtagcattgacctcttgttactcttgagtgtcttggggacctgcctcctctcccttccagtagtcttggcctccttttacctataaatcctggttgccggaggacactaagagttgaaactgagctctggaagggctacggtcactgctgggaaacaggtggtgttcgattgcctcctgatgtcagagagcagggcatggaagtacgaatgggttctgagaacactcctgctaaccctgcctgtctttccattccctgcagcagagagagccctcgtcaaggcttcggtcctgcagtgttaccgacacggttgctgagcaagctcaccttccaccggtaacaaacactcatttccagtcctcagctggtttcctgttttggtttggtttggtttggtttggttcggtttgggtttttttgtttttggtttttggtttggttttgttttgttttgttggtttttgttttttggtttttttgttttgttttgttttttgttttggggggttggtttggggttttttttggggggttttttttgttttgttttgttttttttgttttttagctttgatttaaaatcttcagggctgctgagaaagagtttttcctgtgtcaatccattcaccacacgagcaggacatttgaactttgctgattaaatcgtgcaagggtctggactttccaacccagaatcctacctaccacctaagcttccaaaatgctaaaatcttactctggttttactgagtaaaccagtctgagtctactcagcagactgcatccagcctgcttatatgactgaataggtggtctgtccgttcagcagttacaactctgagtttcagggagctgaactcggtacactcactgacccctttgaacaggaagaactcttccagtgagacagcctgattttttttcccactacccgcggcttaaactctcagctccacaaagcaactgcgctaactctaaaggcagctgcacaggtgaaaaatggtgtgtcctttgcttttccctgcctagagctgtgataagtctgagcgcgcaggggcaggggatatccaatatatgctaacgtaaatatcaaattggagggcaggtgagcattgcctcgcaagaaataatttgcataaattggtttcttctttgggaggtgaaaatattctatggttttaaatgttcaatttaatacttgaccttggccttttgtttgtttgtttgtttgtttttatgggtttgtggggagacaggggtggggggaattaagacagaggcttggtctataagccagaccagcctggagctctaattatagactctaggctagccttaagcttgcagcagtctcctgcttttccctcctgaatgctgagatcgcaagcatgagctgtcacacccatttttttttattattattattactacagatcctctttcctgacctgattcattgtgtatgaacttgaagacaggcagcagaactaaaatttttgaaaccctcttcctcgcatacattttttttcccctgacttcaagggacatttttgttcaggtcttactatttttaaaagttacaaaatgaagtgatgtgtatgtaccagccaaaataataaattgggttgtggagtccattgtgtatggttggctgataacaagctgagatgggttcggtgccgtacagacctcccagagcagaaccgtagactgtgccgcgctgttggggatccttctcagcctgatgattctgtgattgtcctgcgaaattaatcactctccccttcaaaatcagggtcagctttgtttgccgcagagtccctttgcctggatctgtgattgtacctgtccccttgttcttaagatgctgtgctgcgctcatggacccccccccccccaccagtggcctctctgagatgcgcagatataagaatctgctaagctttggactgtggaagcacaaaacattagtcaccccgatcaaggatgtagtctgagcttctttggggtggcgtggtgctacagagaggtcactggggcgtgcccagcttcatttgaacaaggcggatagcggggataccaatctcacgccacctgtcacagcatctccacagcagtgatttctggttcactaagcaatggacgcctccctcaccccccaccctcaaaatacatgttactgatatacattatcatttaacagcccagcaccccaactaggcgagcccgttcgtcaactgtcacgggtggtgaggaatccacggtaatgaccccagttattgaacactaacggtggaagtctgtgggatggtttattattttgcttatgatgaatatgctccctctcattttcaaaatcaggtcagtttctttatggtagggagacacctgcactttttaacctaaacttctcattttggggttctttaaggtactaggtaaaatggagtcgtttttaaccctgtatcatttgaagtactgtatgattggaagtactgtcaagcttggtggactgttttggtcggtgtctgtactccggtgagctttcttttgctgtcgaatactcggttaagcgagagaagctataggagtcgttcaggactgtgcatgtgagtcgaggtgcgcaagaggctgtgcactcctctttcccgcaccacatttatagcagggaaccagattgtctgcatcgccatcctaacctgtaaccactctctgctaccggaagtctgattttccaagaatgcacaagtgtttgtatgattcccagggcagcaattaggatatttcaatgaaagtatttacaattgttattattttcttatttttgattgatagcattcatgcttgtgtataatttcgatctgactagttgttttgtcgtgtcctactgacccttgaagtcaggccacgctgtatttgctgatttgagcttacgtgactctcgggagaagtgtcttaattgtttcacctgtgccgagcaggcgtgctgaagctgcttattatttgtgaataactttaactacttacacaatagctgatttcctagaggaagtttagcactccgtgttacacaaaggacactcagatatgcaaccagagcagtgagcacggcactaggctgctaagccgctacagtcaagaaccggaggaccaggctccacctccagctgaagtcaaagaagtctgcaggcgttagttgcactcctatggttgtgctgacacagcctactctgagtagtagagccacaagcagaccattccactggatggtttgtctgccacccatagtatcctctgagtgtatcattccttgttatgtttaattgggtttgcaacctacttatagctgtggagtgttaatgatggctcatggtatcaaaagacagagcaaactgactgtggtaaatagtcacccaaaaggacaaagtcattcgtctgcaggagaacccatgtgcctctagggctgccctttccaagccttcctcccacctgtgttctcctccatccatgaatatggtcttttacttgctttggtcttttatttttgaagccctagcagtgatagtttctagatgctcctaccatgatataccatgctttcttcatacctagatagatttggaaggaccatgtccgtttctctcccgtcctctctattttccgttctgcctcccagagtgactttaccctttgacctcctttttgatgcatatgccaggcagaaacttcctataaagtatcccctcactccaatgccctcccaaacatacgtgtgccatgattatacatgcaggcgctgtttatttgggggggcggaggggggaaccagcatgatgttgcatacattatgctcagaaaactatttttaacttaggttagtttttctcagctatgttattaagcattcagcattcagcggtggaagtacaccacagtttatacacatttcccatgctgacgggcattcccacactgtctactatgtgtggtcaccgtccttctatgtagcgctcctcccaaaagtgctgatcctcgtctgaggagtcccgaccttttgatttatggcagaagcctgcacactatgtcactttattacaggctgcaccagggttctccctttcagatagaaagagcgagggagcaaaaccctttgatcttcactgaagagattctaaaaatatcctgagataccactgtggctgggtctgggtgagtcatggagcatctatgatgctcagtatcaaaggatagtcagactccctcagtctcgatataatctgttcttcattgtagtgagcggatcccagcctccataaggctggagtgagggcctatttggaatgaaaacgcccagcagtgtatatagtttcggatgaaaactcaaatgttatgttcagcgtatgtttggcttacctaacctgtttctcgagatgagctgatgcatcattcacataggtaataaaagtctaatcattggacccaagcctgggcctcttccaagagccgcctggagaagctgagtcttgtcgttgctggtcatgtgccctgggtggccgtgttttagtaatagccggaatcactggcacaagttgttctacatgcttgtcttgaaaggatgctgtcaggtcgtattttaataacagcttcttgcatagatgtgactaaatgaccagttgcctatttaattcattttagacacattcagaattctttctgctagcctcctttgtgtaactagtcatgttattggtagagctccggaggttgttgcagctgacagttcagttctgagactgtaacacatctaagcatttagggatgtcagaaagtatccattccaagaacagacgttgccattgtttgttaaagtctcaatgtttctagacctgtgtcttctgagaacctatcagatggcctgtccctaaaacatgactcatcaaaaaaaaaaaaaaggagaacagtaaaaagtgctatttaatattccatgtagtcaaagcaattgtgctcatttaagccacagtaagtcaaaacgtattgtctatttgcttagatgacagaacatcagactaggcttccagccagtccagattaaaaccctggaagggaggtagggctttgttgtgggtgtcttccatttaggctgtggaccacttggtctgtctttcatggtcataacagcttacatctctttgttggtgtttgtcttgctcctggattcaggatgctatgtggttcgttgctcttggaattccctgatcctttaggatgtctctgggaaaatgtcaaggagcatttttttagcaagaaggttcctcatatatactctctccctgcctgataaacatagcttagaaataaccaccgagtcagctgcttcccagttagttttccagttcatttttctggagtgtgctgttgagcgtggaaagcccatagaggggcctcttcagtcacagtccttggcaaatgcaatatgcatgttcttgcttcctctaattccgggtcacggggcactgaggactctgtggctgtgaccttcaccagagcagttcatagtaagcagggtagctagggaaggacagaaagaaggctcagtaagagaagagtcacatgatcagcctaattccaagaaagcagcaccggctgaggtacttaagagaactggtgggagaagaccccacaggggaaacagcccccagagcaacagggctgttcctcaacctcccagaagtcttgctggccctggtaggtactgtctttctgaacgcctcccctagatcgttgcttcccagtacaattcgtgattcagttccatggatgcaggcattcctaggctagtgctcgccctgggcatcccttttctgccagtcacgcagacatcctgtttactctagcacctgttcacacagactcacgctgcttcttacacaaggcaaaatctcagtaattcttcatttaaaaggatggaattcatactgggtgtggtggcacgtggcagcactggggaggcagaggcaggctttccatgagttcaacgcattcctggtttacatgtgagttctaggccagccgaggctacgtagcaaaatcctgtctcaaaaaaaaaaaaaaaaaaaaaaaaaaaaaaaggagggagagagagggggagggggagagggggagagagagagaaagggaaaaaagaagacagagaataaagaatttgcactatctatagctcaaactagacatcacagactatggcagggatataacctatgtcattacactggtataaacactgactctaatatgaggcttcataggaatccttcaccagggaacttggggacctcctgggctgagcagcaaagacactataaggaccctgcagattatgtctccgtacatgagtgaaagtcagaggagagactctgtgtcacattttgccctgaacgtttgtgtgcaccgggcctcagggagagctgtgcactgagcatctgtggaagccagctgtctaacagtgcctgcagcatgcattcctcttctgggcctaagtgttgggcggcttgagactctcttttgaactatgtgaactttagcaactggaccaggttatgagacattgtttttttctttactcatactttggtaatggttctgaatttaagacctcagaggctaagagatgattttgtaagaatgtagatgcctttttgtctcacaggagagtagacgctcttagaatccgtttgtttctgacttccagatagtctttgtgggttgtgggttttggtttggtttttctgtttgtttgtttttttgttggtttttgtttggtttgggttttttttttttttctgtacaaacagaattaacttgccttgcccagagaaatataatttctaggtggacgttactttattaaactggtcagggaaacaaattctagttgttaaataataataatttcttgcacaaacagccatcagtggcctatgtacataccacgccgggcctgccttcaggctgggaagaaagaaaggatgcaaagggacgcacatactatgtcaatcataacaatcgaaccacaacttggactcggccaatcatgcaggtaggaagatcaccacccaacccagactcaaggaccgtagcagccaaggtgtcacgaccagccgcctagcacggtgatcatgtcctcttatgaagggcctgcattgaaagcagccctcaccaaagatatgtgttattctcagtagaatatttgcctgaggaagactttggtccttggatatgtatatccaacgtgacgtaaaatatactttcagaaagtgagcctatgaccatggatggctccctctctctccctcccacaccctaagtctcttcttctccaaggctagtttctagttggccagtgacttagtttttgttctcttgaatatgtctcccaagtctttgctccctcccccccccattattagttttaattatttcctgtatgctttaaataggccagccatattatggctgtgtgagttgttgttgttggggttcatactcctcatcacacacagggagatcctcatacaaagagctaacttgtttttgcctccaaactagcttgcagaagacggtgcctccggatcagccacaaacagtaacaaccacctagtcgaaccccagatccgccggccccgtagcctcagctcgccaacagtaactttatctgccccactggaggtgagaagggccgcctcgtctaaccagggtcatctctgtcctgtggcttctcttcattctctcttctctcttctccctaaactggactctgttccagaggcagccccacactgagcagtcatgtgttggtggcaaaggctgctctgcgcaggctgcccaaatgctttggggtctcagtcagctaacattctggactctctcataatcttcattctcattcggctggcgccatgtgtggccggtggtgcgctctctgctgaacctgtgcggtccatgttgtgttgctccttcttgcctgtcacaccatcagatctcatcattcttccgagtagccatgcttctgttgggtttcataacatagcgatcactttgttcatattttctttgactgtagggtcttgtcttccattgtgtgggtacgtgtttctaatgtgcattttcatctctttcatcattgctgaacatctgcttgtacgctatccttgacatgctttagtgaccgccctgaacgtcataaacagcagacactcaaaagccagagaagacatgagtaaattaaagtgctctgacatagtgggagctggtgacagcacctccagactgtcgggaatgtgggataatgactgtcattccaggtggctgcctccattgatggaggtctccttccgggctctaaaaccaggcagtgtatttgttggactgtgggctctttgagagtaaggacttgtcttgctctgctctgaaatctctacccataaaatggtatttttgacaggcatgattggcaaagaattgtagctgcttatccttgatatcattgcttatctaaccaatagaaaggcctaaagttagggttggttagaaagtagatagagaagtaattgggggtttgggggagcctctccctcattggtctccgaggaagagctttctacagtaccagctgcattgtgacgtgtgtcggattggcccgtggtgaagagttctaacactcgttattgttccttagggtgccaaggattcacccatccgccgtgccgtgaaagataccctttccaatccacagtcccctcagccatcaccttacaactcccccaaaccacaacacaaagtcacacagagcttcctgccaccaggctgggagatgaggatagcccccaacggccgacccttcttcattgaccataacacaaagactacaacctgggtaaggctgctgcttttatttggctccgatttcttcactgtgagctccggttaattctcttcctttccgactcaatccttgcgttccttctagcggagttctatcaccagctctgaagcgagtgtcctgaggggctggtgggcacctcggatgctcagacacagctgggggtgctaccagtgtggcagtcctgcaaagctctggttttaagaatttgttccattttgagggtaagggcaaccttggccctgctagccttttgacttcattgtaacacttctcaggctagtagtcattgtattaggaatggtaacatttgaaactagtgttttccctgtctctttttgccctgcccacccttttctctctaatggtcatcccagataagcggtctgaatttctgtgctatattctctctcctttttttcatgaattaaaattgccttagtgacctggtgaagacttgactgttcttcccagtgaacattttgacctaactgatttttttttttcgccttgatgatctttatccactcacacgggtgaaagagcctgtgtgttgcacttgggagaaatgagttgaggccaaggtgaatgaccatcagatcatgtccctctgtcagatctttgtttcatcagcatactcagagctagcttcttcaaggcagcacagagctcttgctagaaatccacattcctccattatagtccctaactctgtacgtaagctgaatttcttctcttgtttctggttggttttgatgcagcaggttttcacttttctgactgtgtagagcaaagttggggcttcatgctgcccctccagcatcaaaactaacctcagttttccctggatgactcttcggtcttggatcagttgtgcccgtgcactactggttcctgtccctagctgtggtgactgcccagttgatggaccaggggtattgtgttaaggaaagggtttcgaccaaggtgaccttggctatcatttactctcagtctgtggtgtaatgttaattcaatcccttgagagtcagaccgtgctccctaaagtcctgtgggctgaggtgcagcatgtccccgcaaggacattcttggcagctagggacaggcctatgccttccactgcgggatgctcaacacccttggctcccaccgccgaatgctaatagctgcctgtgaccctcccaatatactgacaatcaggaatgcactcaaatttccagacaccccatggtgagaactgaaccaatctccaatctccggggggcccttccctgttttgcagagaaaggaatttacctgcctgccaagggccttcccatcaaggtctgatgacattcatttggtaaacctataactacttcagaggcatagaatgacagggaggttttgtttaactcacctttgagtcggaagatagtattacaggcctgtgggccaagagagctgctctttggcaagtagaaccatagagattggtttggggtcttttttttttttctgtcactgacacagaacctgggcagtccttctggtgttcccattttccatagctctgctggggttccaaacccttagccaaaaaaatcagagctccagagataggggataaatatcataaaagtcagaggattagtgaatggagccactgtggcttgccaacataagctatgattttagtaatatgaactagcttagtaatgaaatcccctaaccttttcacagcctttcacgccccaactgcagcgtaagtgcagctgggcaggattgattttaaatagcactcactttctttactgctggcaccggtgccaaatgaaacctgcttttaatcaccagttgtctctctttaccccagactctggccattgaccgattcgctcatttgaacacttactttattgaaacacttcattgcagctaccgttgaaaagttcttaagcagcaactggaattccctcaagttatacctcccttcttcagcaggcagatgtgctgacacagctgtgttatcccgacccaacaaaaacacggacagcataccgcattctcttagagaaaagcagattcggaactaactgcatgtctgtcttgacgaggggtgggagaagcaggaagagaaaagacgctttttgaattcaggcatgtttgcagatggcaaatatgaaactcagagagggcagtgtattcttcttggatttgagtgttgtaacgcacaagggacaaacaaccgataagacagtgaaaatcacacttcttccctcttcatcctgtactgttggttcttgaccttctctggaagcgtgaaaagacccaagccgccatcccctttagacctggagagtgagtcagttagaatcattctacagtgtgcagcctttattcacacaagggatgaaggctgtctaactggaattaaatatgaccacatttttaaaaaaattaataataatggatggctttagcctcaccaacagcaatgtatgctgggagtcactagagacccttcttcattcccccttcttaagggagcagctaaatgtgtatgtgtttgtatattgatgcctttcacaagacaaagcattggcctgtctttacaacagactttatgcattaagttaaattagagctacccaagttcacactaaccaaagcgactgtaacctagcgtgcctgctgagactaaaggaaaaaaagcacattaggatcttttgaccaatcagtattcctgtnnnnnnnnnnnnnnnnnnnnnnnnnnnnnnnnnnnnnnnnnnnnnnnnnnnnnnnnnnnnncatacacacacacacacacacacacacacacacacacacctacccagagggaatgtagacatggcaagtgtgtttcatctgcttgcttgcttgattgattgattgatattcttgtcattgaagatctcattagtattccaccttaccatttaagtgttagcagaccccagctgccatgtctgtcacttgtcctacctccttgggttgtccaagggacagtaccctcagtggttaccactacatagtcctcatatacggactacgggcagctgcagtcatttttttttctactgttactatgataaaatacgaatccttggcctgggcctgccatgctctgccatgaaagtgtggcttccatacaaagccattttagcagacctacaaagctggctccctccttcttcccctcccccggggcctggtacttttcattgatcttaggatctttctgtttttcttctccgcatcacccatctgtggcccacagagccaatagtcttgcacagttgacttcactccatggctgggctttctgtaaacctgacttggtcattggcttcctgggatttcaagggtccttggtagctgtggtatcacctctcatatctcagtgttcattttaagtcttccgaccagttagccagctccaagtggtatcctcattatcagcttcttggcctctctaaatcctaaatcctggcctagctctgtgtgctgcaatatgctacacggatgtagtgatacaaatgactacatctcaacctttggaaagatgcatttgcttcagggtcaacattcctcacaaagcaacactacgatgatttatgccttcaattaaaatctactctcgcttgtagagacagggctgcttgtacccttctctgttcttgctatttccaaaaacctctcacttggttatcatccagcgctcctggcttccactgttgatccgggaagttaatgaagcctttggtttagttggcagcagcgcagcctttctttgctttgatgagatggagctagtgtcaaacggctccatggcttgcttttacctgggttgatggtgttattgttccggttgactgggcatcgttctgcgttttatttgttttctaatcttttgagtttaaaaactttggattctttaagccccaattgtctctgtgtaaggggcaagtcccaactctggatcctctcctttgggcaagtgagtttgagaaactgagtctctgatactgtttttcttatttaaaggaacagagacaagggaggttgcaaggtcagatgcctaactacttttttttttttttttttttttttttgcaaaggagaaaacataaccaaagatgacagagtatatatttccttccttgatttttctctggcctcttaggagcatattttttaaggaaaaaatgcttacaaagtttatgttaagacagggacaggaacctaatcaccagcgcttgatcggtaatctcattcatgttgcctgctagcatacgtataacttataggatgaagcaggctatctctgcaatagcccatggactctctggtcagagagatgcagaaggaacctgtgaagcccaagtactaaggactgctgttcttaaagggtcacatttagagactatgaacactcacccctctctggaggacagtcacacttctcccaatctggttgcctttcccctttccctttctctgagtcttggggaaacagttaacctcccatcggaggcctgttcccctttcctgagatgtggtagccaggcttcctctaccaagcaggcaggtcgctgggatcccctcccaggtgcctgggagcatggaggaccggaaggtgccaatgactgcgcacggggttccctcttaactactatcatgtacatttttcctgcaggaagatccacggttgaaatttccagtacacatgcggtcaaaagcatctttaaaccccaatgacctgggccctcttcctgtgagtatactccagagacatgaaatggtccaggagtgtacgattatcctctcagtgttcctgggaagcctgcaccccctgccccaggctttctgggtccattggtcaatgttccttagaagggtgagacgccagggcagtttgaaaagtacattatagtacattatgagccagtgcttgtaaaagaaggcttctaattactagccagttcgtttttgatataggacatgtgcaaggggcgactattgcaggtggcaatttaagcagcgtgctgttcattttgtaacttagcaactcctgagctccagccaaactgcaaacaaagtcctaagaacaaaagccatggaaactgtggaaggaaaaggcacaaataatcacacaaagtttctctaaggtcacttaacctgtagatcttttttaaaaagcgttttcccctttgttgtgggctctttatgaacctgaggggagtgctttgatttttttttgttttgtttttgcagttttgttctcctttggaggcatgatataatttggtctatactgggtttgggatgaaacgtttactatctgccttcttcaacggctcacccttcattaaaaaaaaaatgctggagatgaggagacagggttgggttggggttggggttggtttggggttctagtactcatttagatgacccagaccagcctggaactcaaaatcccccttggtcttacttcccaggttctaggatagcagacatgcaccactacacccaaccctgagcaaactgtttttaaatggaagttgttattatttcccgaggataagaggagccttttgaaagtttaagaaaatctcttaggctgtgaagatggctcggtgtgaaagagtgcttggggcacgagcgttaggatccgagtttgaatttccagaacccacacggaaagctagacttggccacatgcacgcctgtagcccctggtgctatagggaacacaggggagggtcactggagccggctggctactagactagctccacgctcagtcaaagaaagaccctgtctcaaagaaacatggtggagtatgaacaggatacccggtgccctcctggacttacacacacacacacacagaggcatgtacacctgcacaggcatgcacacatacaaaacacacacacacacacagagacaccctacccctcataaaaaaaaacccaagagaaaatctattatctctttctgagtcaggtgaggtgtgctgaccttaacgagtaccaaatgttggggctgtgactcagcaggtgaagcacttgctatgaactactcgtgtaaggatggaattcagacccccagagcccacaacagaacccccacgagtgggtgtggcacccttcctgtaagctgtgcaatggagaggcagaaaggcaatccccacaacaaactggctatcagacgggaaaaaaaaagcacctgctcccctgagacattgttaggatagagaacaatcaaggaagacacctcagcacaccacgcccgttcccacccggtgcgctcgcgtgtgcatagatgaacacccacatacacaggtagaggaagcaagggaaagctgtctgttgcccgagtcttttagttctttagtgtgaatggtgggagtcctcagcactggggctgcccagccacttaccgtgtgacttattattcttacaaatgattctcacttcgtatagtcaatactgctcagatctcagcaagacaagataaaggctaagattcatctccaaaggatatagttatatgaacctcctccttccctgaagtatatagtagggattttaactaaaggaacatcctatcctgaactcttttacaaatgtttctcaggtttatttttatgtatattattgttttgcctgagtctgtaaatatacactatgtatatgcccggtgcccgccagccaaaagaaggcatcagatcccctggaactggaattacgaatagttttgagatactgtaggtgctgggaaacagacccaggtgctctgcaggaacgtcaggtgcttttgacccgagctgtctctccagccctgaagttcccagggagccccgtgctggtgtttcatatggtgaaagcttgtgagagaggtgcttggtccttcgtgacttgttagctgtgcattgtttggcatttcctcagtgctcaggtgttccagcagagaagggtcctggagtgttagtgtcaccaccgtggatttgagaactgctaattgatgtgtgtgttttcccctgatttgggaactgctaactgatgcttgtgttctcccccctccttgtcctggatgctagcctggctgggaagagaggatccacttggatggccgcacgttttacattgaccatagtaagtagcccctgctgtgcccacaggcgtgacagggtacaggaaggggagggtgacattaatgtgatggtgaagctttgtcattttgctccctgtccaggcagccaggtgttatgtggagagaatgataccagagagtcagtgcccttatacggtactgtgccttcaccctgaggttgctcccaagtagcccttccagctttgatcttgtgacctattaacttttgttaatgataaaaaaattttttttaagttttgttttgacagtcccttgatatctgcgcttttttaataaatacactctggaaatagaaaataagattagaagtgatgatttagcttttaaataaaaagaacgaatccacgggagcaatgttctccacagtggatgctttctttcggagcactgacttccgaggcccgttctgaacttattttctatcgtggcatgtgtccctgcacccagcccactaatgatatatgcagctgttttcctgaaaccttagtgtatctgctgaaggcgtttgctttagcacccgtggatatatgtgtggtttctcatttcatctacaagttaaactaataatccttgcttttagccagggagttgggattgggggagttgagggaagttttgagttggtttcgtttggtttgggggggggtgttttgttttgtttgtttttatctttagcgggattgttttttttcataaaattatattcatgtagccctaaaactttctgaagaaggaaacaaacaaacgagctttaaaaagcttctggtggagttcaaatccatgtgcagttggtgggatgtggttgcgtgtttttatttagttcggaagcaggaagtgagctcaagtgtattgatgagcctgttgctgagactcctgtccccaagcagtgctcacacatagaccagcgactctctgtggggaggagggacttcctcccagcgtcactaggggacctaggatcctccaagaacttgccttcaggcatgaaagttagtgggtttgaagtcagtgagaaggcctacccaaaactcagaatatttagagggcagggccacgcttagagttcagacagattatttcaagatatataagctttcgttttgtctttgattagaaaaacaaaacaaaaaaacagagttagttatacactttccagcactgtactgtgagcatacagttgtcaacatgaccactttctttctaggtacatgcatggattatccccaccccacaatattatttattttaaattctgagaactttctaaaatgggggagaggttccactcttaatgccactaaaaacagctctccataatttaccaagctttgccctgtggatgagtgtaaagggatacataccgagaagccattcttctgccttatccatcaaaatctagtgtgtgcactacaaaatccctgtgttttcaaaggttttctccggtcagtgggttctcccccagacagctttaatcacctggtggataagagttagaagctttctcaccttcagagtaaaatgttcccaacatttatctggcaaaatccaccatctatctcccttggctaccaccatgcccatgggccaggaaccgggcttctatacaggtgccataaggcattttctatgttgacagtgactgacctgagaggcagactttcagaagcactgaacgctcgtttgaacaccttgattcatttgagagataattactgacacgctttttctgggtaaagtgttagagaaatatctagaaatgtttttctcacagaccagatgtgcccagaagccgagccatcagccagtggtatctcaaatacaaaagttacaagagaaattccaataatttctgtgttcctgcaccctgcccatagttacctaatgtaggagcagtagctaacgtagctaggtttctcattccctctacttccttttcgtcgtttgatttgaaatgtaaggtctcagagaaaaaagagtatgtttagattctgccgttcgttcttttttggcacgttcttttttggctaactgtcctccacagcagactccttctgtagccccaggatcatgtgtgtggttccagcactcagactttttgaaggactttgttttctctctcggcttcttccctcagtcattacaaagacaatccattaaagctcccattacatgctacatggggcatggtaggcagtggagaggaactgtgagactgagaccttacaagccctgttctcaagggcccatgtctggtagagagtgccaggaggtgtcttaggtattgtgttggaaggtgaacctgttacttgagtgctcagcttgagagtggctgaagatggctctgtcggtgtgtgtgtatctgtgtctgtgtgtgtgtgtgtgtgtgtgttctcttctggacagattttgagcaggattcgctctaaagggcatggtgggaatcgggtttagaacaaaccagatagggccagccattccacactggtagtgagaactgccccacgggctctgcccctcaaaaaccctaaagccttggtcacgatttgtttgtatgtatatagacatttacaggagcgtgactggtggtgccacaccaacctcgaaggaatgcagtcctgttctgcctgactggcatgcaaaggaggctggctggctggcatggcacccaagacaagccgacagatatttgacagggaggactcagattcactctgcaaacagtaggagcttcagagggctattcccagagtcgaaggacagtggtcagatgtattcttgagaataaactttgggcagacctacgtaggaaatcttgaatagaagctagtaagaccatggccttggagatctagagcacggagctacagtccaggacacagatgcatgccccatccagcaagaacaaagtcatgacaattggaagatcaccaaggactggcaaggacatgggcaggttctggatcttggcggtcagtgcattatgacactgcttttgttaatgagacttctatcattgtgacagataactggcccaggcaatgtataggaggaagaattcattttcgctcacagtttcagaggtccatcaagtcctttgctccattgattctgcaccgtcatcgtggtagacaaatgtggcagaggctactcatcctaacagactggaagagagtgacagaatgtcaaggctgatgacccttctcagttttctcctttaaatccatcctagcacccagtttgtaggctggggccacccacattcagacaggtctttcctccacccacttaatcctctctggaaaagccctcacagacacacccagagttttgcttcactaatctcaattcaatcaaatcagtgggccaggttaatccttgggctgctgactggggtgtgaggttacctggccactgggcgttggcgatcacctgctcaggaagctagggagacccggtgcaggcatcagggatggagtcagaagatttgaacgccctcctgtgttgggagaggcccgtttgttttgacgacaaacatccagtcaagacagtattacccaagctgctggataaaggcatggttctatctagctgcgtcctgctgtattctgtgacctgtgttttattttggtgtttttgtttttgtttttgtttttactttttcacctcagtagcagctttgaatttccaaagtctttctcgttttagaaattagacaacctaaaatagcacccatatttaaattgtatttatttatttaaataccacctgtatctgccggtgttccttgaagcagttgagttttacacttgtggacattttctgccaaattaacatgaaattagcattgtagatgtatagtcttaaggggttggagttttttggggtttttttttgttttgttttgttttgttttgttttgttttgtttttgctttaatcataatcagcccagagcattttttgttaacaatgcctctgttttcatgaaagttcataacatcagggtttttaaaaaaaattaactaaggtgcttttagagttgaatctgtgagttaccgtcagcacactagtgggctaagagtgagcagggtgttttcagagaaacaagcgcccccccagcccacaacttatcttttaaacttagaagtaacctgttgtaccccagcctgccctttgtcacctgagtgcccagacgcacttccacctgaggctgcacacacaaggcccctctgaagcagttttaatcatgtgcaggtgaaaccccacatgacctgggcagctgctctacgccatcacctgagcccttttgtttgccttttgggagaaaggaaaactgcccagccaggctgccagggaaccctttctctgaagtcttgctcggctatgtctaattcttatttttttatgaccgacgacctttgctgccttggctatgtgtgtgtgcgagaggcacaaaggtggattatttctctgttcaatgtagaaatctctacttgaaagcagtttttcaacatcataagcaaatgctaagaagtatttgaaatgagaaagaagtgtgtgtgtgtgtgtgtgtgtgtgtgtgtgtgtgtgtgtgtgtgtgttagttaacttcctagggaactaaaccttatgccttttgaaaaatcaagatcaagttataaatccttaacgagtagaggggtttataattgcacatttaccaggttgctcaccccaaactgcaaagatatggttttacttttgttgtgcatttttattattattattattaactaatcatatatatgtttgccatgcaatagcagggttgccttctaaccccaaaatactaaattctccctggggtcaacccaaaggggctttagaaaggggaatttttctttcttaagtaccctgtagaccgaagggattagaactaactcgttggtgtttttaatgttttcagatagtaaaattacccagtgggaagatccaagactacagaacccagccatcactggtccggtcagtattcttatgtccctctcctgcatatagcttgtgactgcgtagtacacacacttcttgtgtgttcctaccgtgatgtccagacactggtgaaattgaatggtttaagattcaccccagctcctcagtgagctttccagatggggtacagctgctgggggctttcgagtggaactgggactagaaaggaggagaaaatggtattgggagcagtagcaggttgaaaggtgttcttcctggtcctttataaaaggatggtttaaaccgatagtcagaattgtctccaaccccccccccctttttttaacagtaaagcatcgttgttaacaatattttaatacaggcttaaccatgagaattaggagaaagagaagcactcggaaaaatagaaagatataccctgtacccaaaagtaggcgcaggccccttaagagagaaaaacactcctcccttcctgtttgtaggctgcaaggccaagccctgcatttataggccgctggcatttgttaggacagtgacaataaatgcatgctaatcaacctgtgcctcttccacctttaaaaccctgtggagaagaggttggaagctatggattgtgtgtggactctgctgatccaccaactctgcactagtgctgctcacgcgtgctggttaggaaatgtccatctgacttcgggccgtgagcccccgagatattgcggcactctgcagtcatggatggagggaaagtcctcttgctagtgactcactcatcggcaagtagtactcggtgagctaagggtgctgagaggccatctggttggccttttccattaaatgctcacttctgctgatttgcataattctgtttttttttttccttctgttttttcaagatgttctcccatatcctctggcctccaaactggtgattagaaatttgctgcagtaatgattgccatttcttggagggcaaatagttctctctctagtgattttttttttcaattttctcattattgttgatgttctgagagctcacagtcacgtgttggactgtgggtttccccttgtggatctcctcttcgatgcaggatcatccatgaggagggatgcatcagatctgtcctcgattctggcaaaccctcggccacctggtcccacacagccttccccgtccttactccacccgagcctttgcatcactctccatctttgttcttgtctcttagtatctccacttaaatccctgggtagagataaagttcctttgttggttccctgggcttaaggttagttttcctatactctttacagctctaagcctaggagcctgttacagcttaggtctgtccatgagacgccttcaggcaatgactcaacaagataaaacccatttctagcactgaatgttttatacggtctaaaatcagataactcagttttaaaatggggtaccaaattaaacagtgtttagatgaagcacaaatggctgagaaacacttaggtatttgacatccttggctctaagggaaaagcaaactaaaactacttttagatttcatcttaccctagtcgggttaggcgaggtcaataaataaatgacagtccgtgttggtgaggctgtgggaaaaggggacagtcacccactgcggttaagactgccagcttgtacagttgctatgaaatcagtatggggtccctcaggaagctgagaatcgatcttcctccaggtccacctctaacactctcaggcatatacccaaaggactctacctcttactactgagacacttgctcattcatgttcactgccgctctgttcataacagccagacattggaagcaacagaaatgtccgtcaactgatgaatgactaatgaaaatgtggtgcatttacacagtggaatattaaacagctgttaaggaaaataataattttcaagtagatgaatggagctagagccattcatcctgaggtaacccagagccccaaagccaatggcatggaatcttagtctgtgggtcttagcttttaaactttcagtgtgtgtgttcaattgaaataaccatagaggttagaaacccagtaagtggacagggaagaaaagatcccacaaggaagaggagagataaaggggaaactagaataagattgaatgggggaggggtggaagagcagggcacagggggagggggaagtgtggggagagactaaagattctttgaaaaaccatatggaaacctacgactgtagaggcttccaaaaatatatacacacgaaagaatttaaatggagtcaccatatgataggggaggcagtgttccaaatcaggctcatcttccataaatgaggaaaaggttttcagtgatgaggacatatcgtgaagctagctgctgatagagtctgtctaagctggcaggagaaaatgggaggtgagtggcgcccctgcctcccccacctctaaccccgatctcagtcacagttaatctaaccaacagtgtcatccaaatgcctccttggggcttcatggtcactgttccccatctgtttcctccatctctctcatttctgctcagagatacctcagagctgccttccctaggctcccacaaaataagcacacaccccccccctcccccccgcaatctctatcagctttccgcttcttaactcctacctctatctattcttttttggattaattgtactaagtagtagttttcattctgacatttgcatgcatgcatgcatgcatacctttcttcattcatctgttgcaggatatctaggctgattccctggcttgcctttctaattacctactttcctactgcctgtggccttctaccaccatgagctccaggagggaactgggaaaggactttgttttatgttgtcatttttttttaagcacttaaagtgccaggcagcgagaactttgaaaatacttgctgccaggtgagtgaggcaccagaaagagaaggtcagcacctcccaggtgtgaagaaaatgttgtttgtgaccggatgtagtgctgagagaacagaggtcatgatgacgtcaccttagctcgtgttagaatatgtctgaggtggagtgtagtgctgagagaatagagaccacattagttcgtgttaaaatccactgttcttgttctcctgctggtggctgtctatgtactagcaagtgttgaaagtcatacgggactccctcagatataactctgtccggaatgcatggcaagagtggtcggctctcgggctcatcacaaacccatgtgaaaacatgcctgcacacagaaggaagaccataggccttgtgaactgtctctagaatgttctcaagcatcctgtatgaatagaatgtcttcattgctcttgtattcgaaacaaatgacgtgaacttttctataaagaataggtttgggggggttgagggggaggctgtgtgatcatgccctaaaacagaatgcaaaggacagaggttttgctcttcactctgtctctctgtgggcaggaccaggcctgatggaaggtgctggaatctggggatgctttgctgagggttgggtacaccatggccaagttcataagtttgctgaaaggcaatgagttgctctgactgaggcagttgctgatacaatcattgtattgtatacaagatcagtccactttggttcataaatgaatcacagacctctacagtcacctccaggcagtggttggactccaggttttttcataatgaagcgtataaaggtgacttaaatagcctcgttcaaatactactttgccacatacttaaaagaacatacaagatgtacaagaactttcgacgtgttgtttacttctgagtcagggtcttattaagtggcccaggctggtctcaaattcatgatcctttgccttcgcctctcaggtgtcacctagacaggctatcaaaactttccgagacttgtatctcactgagaccttgagctcaccccggtgggccattttgtttttccacagagaaggtgcttgagtttaaacgaattctttcatacgtgttctggtttcatttcttttacagtgataaataacttggcccaaagccacccggagggacttacattccggatacaggccatcaagggaggagcttgagggatgctgcatgctggctcacacaggctcatgccttagctagcctccccatccaacccagaatcaccttccctgggaatggtgctgcccacagcgatctaagcccacctataaaaattgacagccaagacaatccctaggcagacatacacccatctgattcaggaaattactcaagtagacagctaagccaaccaggacataaagtaaaaggcaaacttgatgactcctcagtctaactcttttcaaaagactttgccgtttatgtagacttccccctcctcgaaagaggttatcagtctactgcccttcctgtttatggcatttctccacaagttcgtttgagttgcgttgttgctgttagtctcgtgatgctagggatggatcatgtccccattgcttcctgttttgagacagcatcttggtatatcgttcagggtggtcttgaactcactattgtcctgcctctgcctcctcctgagtcacaaatcagtagcatgggtaatatgcatggcttcccataaagactttttaaatgagcagtatttatcacttggggttgtgtgttaaattgccacatccaataacactcgcctccaggaagaggaagtgatacacatataaagatgctttgtatccatgtatctctgggttaccctgactcatactccagcaaaatccatatagaacaggtatctagtttgtgcggtgtgaccctaagagtttccttggctacaagtctgctgttgtgctgactagctctcatcccatctgagacccggtcctttcctgtgcagacattatgccagttttctgtagaaaacacagaatatgagtatttaaggttttgctgtccatgaaactttgccaacattggctcgctacacataagagtttgaggcatatgcttacattatctgtgcgtctggatttctcttgcaggctgttccgtactccagagagtttaagcagaaatacgactactttaggaagaaattaaagaagcctgtgagtaatgacgtcttctgaaagctctgttgtagcctgttcccatcacccgttagctcactgagaacagcatgcttgtggcttgtgtgtgcacacttccttttccatgccctttggcccacccagatctttgacctggattttccttctaacagaaatgataagtgaagactagcccagtgttacattatcaaatcaccgcaagggcaatttctcatgtgatacattagacgatcatatgattcttgcggattagaaaagaagaccaaagtcaagaaatctagggacaccacatggaattacacctctttatgtctgagatggcaattttaaccatataactaacatacatattttaacaaggtatatttttacaacacataattatattacttggtagagttgagcccaagtgtgattatcatcatcatcaacaacaacattttacaaccacgagacgctggaaggtttatacagacagtgctgagttgacagcctgtgcttattgttggcatgcctccccacccccaaccttgcgtcttctgtgttcattacctgcagtatggatcttagttttgctctcattttgcccagaaaattgatgcctttagccaaagaaagtatgagccccaatataattctttctttgcgtgagactgccaccctctgtctgctccctcccagttgatgttctaggtctgagctttgtcctgtggtaaagaagtactggtcacttctatgctcactcagaatctgtcttctgtcctatggttgtgactcaagttcttcatttataaccaaagagtttttgtcctcgaagctcacattggcacttacagtagtgtttctttgtgagttatccttgtgccctccagtgacgagcagctccgtgactattgtccttgtaagcaagcctagcctggacctcatccttccttgcagaaggctgtctgcacacctcactcacgtgctgggttacattcagtcgactctgagttcatggatgttttacccaaacttagtaggatgctggcccccactccccaccatagcaccatgaacttgcaggcagcatgccttgcatctccccactgcagttcctaccagagaagaccggttccagcttgcctggaggttataaagggttgattacatgggattaagtcttctctctttctttgactgaaccagcatcccaaggtgcctgtgtgggggaagtgcccttgtctctctccatagtggtaaggatgaggttttgggctcagtaggtgttcccctgaagattatgtgggtgattcagcctgagcagctctgaatggctacttcgctgtgtcccatcttgacacagggaggttctccctctgtgaaaggacaaacctataaaggggagactcttgggagccagctgtcactgcacatttatctgaaggccatcattgcttctgctctttggctattttcctggaaggcaggagcgtgcgcgcatgtgtgtgcatgtgcatgtgcgtgcgtgcgtgctgtggtgtgtggtgtatcatatgatcataaacttgtctttttatcttttatctaggctgatattccaaacaggtttgaaatgaaacttcacagaaacaacatatttgaagagtcctatcggaggatcatgtctgtaaagagacctgacgtcctaaaggctaggctgtggattgagtttgaatcagagaaaggcctggactatgggggcgtggccagagaatggttcttcttactgtccaaagagatgtttaacccctactatggcctcttcgagtactctgccacgtaagtgcatggaagacatttgcgctgtgtgcccttccctgcagctggtatagttttcttcttaaggaacttaacataacataacataagacaagaaactcacccatttgagatttcagtccctccctaccctaccaccctaacaagtctaaaaacaagttctgatccaacatggcgaagcactgtacactgtgaacgcctgaaactgattcttctcttgtcagtttggctcacagaactgaaactgaaattatgtcaggtgattatagagggagcaaggcagttttcagctatagtgccattctgatataagggaaaggtttgttagtgccagaattcagaggcatatgaccacgaatcattcctgaagtcacactacttaaaaggcaagtcatgaggatttgaagacccatgcttgggatacaaaggccaatgccctgctcccatagtagaaggaccaggctttgccttccatggggattcatcattgcctggcaagggaactgaggcaggctaaattgttttctcagcaaacatttggctcctattgtctccaggctgagaatgctcgagagcacgaggccgatcttgaattcccaatagaacagttgatcttggcaaaagatttagcattgctccagagtagacttcagttgatgtggcttctcctacaccttcctcctggtacctgtatgcttagggctcttttagaaggctgcctcgggacagtctccagttgacctagccttgattagtgaggttcttagggaggcttctgagagaatctactcgtaacaccactgaggtagaaagaggaggagccaaggtcctgacctctccctacatctcctagatacccccccatcactctatgctgcctggttgaaagcccctcatcctcatgattgtaaggccgacagggacccctgagtgtgctccgggggttgcattgtggacatggggctttccccagagctcttgaggtcaggtaaaccaagagacgaacgaacctttaggggaaaattcccagatcaaaagcctctcagaggaattaacttttgctcacagaaaccatctacagtagagcttgtgtgctggaggatctctgcacaccccttaccactgggagggttcccttcttctcaagatatctggttgacccacttgaaattgacattgtgtatgtgtctgtatgtatgtgcatgtgtgcatttgtaggtgcaaatgcacttgcatacgcgtacatatgagggccaaaggacaaccacaggcatcctcaccttgttttcaagacagtctctcactggcctggaacttgccagaaagctaggcagccagaaagcctccagggacccatctgtttcaacttcctgagccctggaattgcaaatgtgagctgtcacacccagcttttaaaaaatggtgtcctgaggatcaaaccaaaagccccaggtttgcaaggcaactgctttatgactgaacagccatccctaaaactgacatttctgtagataaaagttagctgactgaaagcagtttccatagctttacctgctccagtgaaccgtaactgtcaattacagaaaggcgtggctgactgatgggttacattccctagttcatatcggttgccacaaagtccccaaggttgcccatgcactgtaaaatgaagcaatgggtggcaaaggggagttcagcttcttggatttctttcatttaagtatgactggacttttctcttttcctccccaaagggacaactacacacttcagatcaatcccaactcaggcctctgtaatgaagaccatttgtcctatttcaccttcattggaagagttgctggcctagcggtgtttcatgggaaactcttagatggtatgttactccaaaatcttgtggtaatgaaagtaaggcagctctgtttgtgggtctgcaatcttgtgggtctgcagtccagtgtctgagcccacgtgtggatagtaagggtgtcacgggttttctgtagctggttttcctcaggaggttgaacccagtgtctccctccctgactcagagccccagcctacagtatgctggttgctgttttccccctaaccgtggtaacttctgatatagtcttgagcactgaagacaaagcatctatctatgctcatatgtgtaactgttaagtgtgacgaataagttgttccatgagtttttcaggacagctttcctctgctgagagcttgatccagctgacagatggaaattttaattgtaaagttaattaaaatgatctcatccgccagcagcctgctattgctccattttcccccaaatcagtttttaatgatttcagagtaacattatcactcagctaaggccttagccctagagtgtcttctgaagaagacagaacaaaagccgtgtccttaagaggaaatacagaactccaggacatgagaattgaggactcaaacctcacttgctcatgggttactgcaccaggtccttggccattcagtcccgacctcccatttacatggaaagcagttcattctttgattccctttgcagatacttaggggtatcaggggcttaaaactcaaccaagtttttgccatatttcaggattcttcattcgaccattctacaagatgatgctggggaagcagataacgctgaacgacatggagtccgtggtgagtaaaagcagtgcgtcctgtagccgtcacaggctgcctcaccctgtgcacggtgtcaggagctgtgtttgcagtcacagctgttgtcataggtacagtcctgcggaacataggtacttcacatgaacaagagggaggaatcgcttgcttgaaatttaattgatctcctgatttctataataagcaaattatggttggtttctgaaaaaacatggtacttaaggtcggtacgcctaagtctcaattcccacttaacgaactgagacttgatgagcagattaaacctgaggggcacctgaagcccgccgtagccttgctccccatctacagtgtgacaagattccaccttctgttttatgccttcatagaagtggtggaggcaaggccaaaacaatagtcatctagacatggtcgtctcgacacaggaattagtgacagctgcagaatgggagcgtgggatgagtgttagacaggctggcgctcacagggccccatgcttgctgcttacctggactgactgtccttggccaggaaagatctacgaaacaaaacatgtccttcttttcagaggacacttgaatgtctggctttctctatttatgtatactctgtagtgtatgtgtgtgagtctgtgtgagtgtgtatgtgtatatgtgtgtgtatatgtatgtatgtacatgtgtgcgtgtatgtatgtgtgtatgtttgtgtgtgtatgtgtgtttgtgtgtgtatgcatgtgtgtacgtgtgtgtatgtttgtgtgtgcgtgtgtgtgtatgtgtgagtctgtgtgagtgtgtatgtgtatatgtgtgtgtatatgtatgtatgtgtatgtgtgcgtgtatgtatgtgtgtatgtttgtgtatgtatatgtgtatgtttgtgtgtgcatgtgtgtgtatgtgtgtataagtgtgtatctgtgcgtgtatatgtgtgtgtatgtgtgtttgtatgtgtatgtgctcctgtacatatacataagtgtacacacgcacactggcctgtgtgtactagctacatttttgttcttgtagaagaattacagctctgttttcatgtggtcacttgagttagaaagctgtgcatcccttggccccgctggcatatggaccgtgtgtgtcttgggcagagctgtgaatgtaagcgatgcccatgatgccagctagagctcactgtgtttctgctcggtgctgcgggaggcgagagacgactattgcactctggacctctgtgacctctgcagactggctggcgtctgtaatctcagctcagtctcagtttcccttcgagcctcccctttgtcaatgctttctgcttctgctgtgccattctgaggagtctaagagcacagaaattgcttctgtgcgctcccaaccctcagtgaaggaagggggtcaagagaggattatcactgtgtatggggtctagcttggcttagaacacacagtcctccggcctctactcaagtgttgggactctaggtgttcaacactatgctgctggaaattgttcttaacgcccaagtctgtggttcctatcggccactagtgtttgggggagcttgttattattttgttattttaattactatgtattaggggagtggcacatgccaatgagcaccggtgcccatagagaccaggggcatcagagtttccctggagctggtgttacaggtgcttgtgagctacccagggtgggtgccaaggatcaaccttggatcccccaaagagcagcgcacattcttaactgctgagccatctctgctctcccagcagagcatttgtgttttaaatgtgatgtgcatataattttcggtctcctttgagcctgtcatattcctagcaatggagactttgggcatgagcagaagggacctgatagcctcatggctactctcttctaaaacacagctctgctttttacttaaattaatgggcaaagaacactgaagaaacaggaaaggacagagcacaaaaatgtatggtgtttagttagaacactgtcctacgtggtctctgatagtagactctgagaagacaggaagtcggtgtgttaaattctgtgtggacctgagacaggcatgctgtggccacaaacaatgcgtagccaggctataatcccagctcctggatgctgggtcaggaagaggagttggagaccactgtggggttcccaaacaagaccccctaactctccagctgctctaactcccctcccaagcaggtggccttcacagtagagaacaggggaagtcactttccacagatcttgtgttttacattagtgggaagatggggctcgagagatgactcagtggttaagagtgcatgctgctcttgtagaagacctaggaattaggttcctagcgtggccaacaaccagccacctataacaccagctcctgaggctctcacctgaacacatgggcacacatacacacacacacacaagtacacagacacaaaataaaatctaagtaagtaagcaggaagtggttttgttagagcagactccctgagtagcatcgcccttggacattgggcatagaattacattagaatgaatttattcataaaggagccagacagattttaaaattctcacgtttcctttctatgtcattccgataggacagcgagtactacaactctttgaagtggatcttagaaaacgaccccacggaacttgacctcatgttctgcatagacgaagagaactttgggcaggtatgtgggttcgtccagctcctgtggctcgtgtccctttgccgtggactataggacagcatggctagacagttagaaacagccacacagactttcagctgtcagcagcactgtgagcagcatttgactggcatgccaggacaccaggttccctatcatagaatttcctgtttccctgcaaagctagtaaattctaaaggctgctggggtctcaactagcacccccagttctaacagtcatttttaactttgcatctggaatagaggttcttcagaaagcagtgtgagtgttcgctttagcgggtccacatctggtcaggtaccagtgatgagccaggacacggagactttttcctctatggctctgttgttatgatgtgactcttacgcgctgagggttgttttgtttggttttactgttcttccctatatcaccagtcagtgtggattcgtcatagttacttccagagtggaagtcacctggttgggatcttggtggttactgtcagaatctaaggctgtgtacatcttaaatatggaaacttggggttagttgtcccctagtgacagtatttctcaggaggtatcttcaaggtagtatacatctacacaaaagcccaggcatgattccagtctctgcctggccttgggatgaactgaggagagctcacagtaggactgccatggggaaatcttgatctgcatggcttgagggaggatggagacaggtgtctgtggctcagactgagaggtaaagtcaggaattcagctccctggtgatgtagaaattatttaatcccaacccagggtttctaccccatctttaacccttttagttcccagataaaagacacacacaacctttatatttacaataagccttaaacagcacaagaactgggcaggtatctaccctctatgctattataatctactttcctatctataaccctgagttattacttaccatgtttcatctgggctgctctgaactcccaattggccagcccttagggccatgcttttatggctcagctaacccatggtagcttctttcttcctcttgcacctccttcttctccttgtggtcctcctctaaccctaaatgacacctaaaccccatctatatctcttctgcccagctattggctgttggcatctttatttactaatcagaaataactctggggcagggttacttagtatctacatgtggactctctcctctctggggcaaccagtcttggggggcgggggggggggggcatattagcattagaatacaagcagcatcaggccagcccactacctgctggcctcccaggttagagaaatcttagaggatcacagagggggaacacgcgatgcagtgaagtaggaagcaatgagtgaaactggagtgtggggttgcagactgaggacgtgatcgtggaaatatccgagctacatttttacctgcattccatgcattggagcaggaagccagccctaggcgctggcagtgggaagacctggaggactctatttgccttcccagggctggggaggttcatagaacaatgtcaggacccagagagaaggaaccttgtgactttatgttacacctcactagtcatccccgcccttgtcacaccctatgttgatgcttcatacccaagaaccccacagacagcgcctactgttcctgtgactgggggccttgtcacagggcagggagaaggcttgtcatggccctccacctccgagcatagggccttcctggctcctcccagtcctgcctgtcttctttgattctctgcactccctctgggaagggcctggaggccgggcatccatgctttctcttgtggctctgctcacagggctgtgtcacaccactgaccctctgcctgctcctttctagtcccacccactccacccatatgacctcatcccatttgcagctccaccactgtcccccacctgtgacccatatcttctccaattgtgctctgttcagccacctccttatggctcctcccaaagagcccaggctcctagcggtacagcctttgcctcctgtctgtctccacagtagtctttctcctcagtagtgaaggggaagtgtgattttgaggnnnnnnnnnnnnnnnnnnnnnnnnnnnnnnnnnnnnnnnnnnnnnnnnnnnnnnnnnnnnnnnnnnnnnnnnnnnnnnnnnnnnnnnnnnnnnnnnnnnnnnnnnnnnnnnnnnnnnnnnnnnnnnnnnnnnnnnnnnnnnnnnnnnnnnnnnnnnnnnnnnnnnnnnnnnnnnnnnnnnnnnnnnnnnnnnnnnnnnnnnnnnnnnnnnnnnnnnnnnnnnnnnnnnnnnnnnnnnnnnnnnnnnnnnnnnnnnnnnnnnnnnnnnnnnnnnggtttctcatccgtgatgttcctgaaatgcatgcgagcttcctgtcaccttcagtgtccttacaacttataaaggtcataaccccttacattctcatactacccagtcctcacctcactgtctgacacaccctccctcagctttacatgtaatggccctcttagcatgcccatatatgtgtcttggtgccacggtattgccagtaccatgtgccgtctccagacccgtgcattctctctgtcttagcgcctttcctaccctcctccttgtcatgggctgtctgtaaaccataagcagcttgaagcaccttgtcttagtgtcatccatgcacagctcataatatatacgcctactgcatgcctcctgagcagatatagtacacacccaaatgtagttgtcatctaattaatggtaggccttcgcaggataatacctgtgtttcacctctgcagctcaaatgccaaaagtcagccacttccctgggatgggacctaggtaatagggacatgcctcctggccgtggagttattgtgtctcactgcgcagttagagtttgtgttggaatgggacccttggaagtgctcagaacatcatccctggcgaccagtaacacaagtgaaacaggaaggaggtgacaatgctcccattaactaagaagctgcaccaaaccagacactattgtggatgccaagaagtgcatgctgaaaggagcctgatatggctgtctcctgagaggccctgccagagccttatacagaggcggatgttagcagccaaccattgtactgagcacagggttcctaatagaggagttagagaagggactgaaggagttgaagggatttgcaaccccataggaagaacaacaatatcaaccaaccaaactgcccagaactcccagggactaagccaccaacaaaggagtgcacatggctccagttgcatatgcagcagaggatggccttgtcaggcatcaatggaaggagaggtccttggtcctatgaaggctccatagatgccccagtgtaggggaatcgaggatggggaggtgggagtgggtgggtgagtggaggaaccccctcatagaagggggagggaggatgtgatagggtgtttctaggaaggagagaaactgggaaagggcataacatttgaaatgtaaataaagaaaacatctaataaaagggacaaaaggaagcagcagtagctgctggtgtccagaggttcaagaaggggacagtaaaataccttgctgtgtgtgcatgtgtgctctcggccacctgacagcagacccagttggcagagccacccttgccccaccttgttgccacggcctcattatttaatatgaatagtctagtctctttctttcaaaagcaattctaccagcttaattgactcttaataaaaataattaagccagcataataaaaacatacaaaaatatatgtctctcacgattccaccacctcaagaaaaatcacagtgagaatttttacttgtatcttcctgcattggtctgtgcacacccacaggtttgcttgtgtttgtttatggaagtaaaatgagatgccttcctacatcagtaaatattctgtgctgatttgatgactacaacaaatgtcatcttacagatgttctgtatattttatttttgcccttttggtggctacatagtcttctttggtatttactatataaactgacaatcctggtatatagcatcaactgtacagccctgggaataaagtatgtgcgtgtgtgctgtatatgccatttttcctttaacataatttctgagaaactgttaccaaaaggagaaaatggatacagatctagagacccacatgataggaggagagctgacctctgaccgcttataaaactaacaaatgatctctgtcttaagtaagtgtgcgtctttctgtcctttctttctacttggttttgttgttgttgctgatgatgatgatggtggtgatgatgatggtggtgatgatttattgagttttgtttgttttgtttttttttaattcttatatttttgctgcttgaaagaaattccatgaatatttctttgagtaacttaatttcttgtaacaaacagaattctagaatttgcatctctgggatgatggttgattggagtttggatctctgtggtctggatggatattctctggtgtttattttttttaccttgaacatatgttttttagggttggttggttggtgggtttgttnnnnnnnnnnnnnnnnnnnntcttaagtaagtgtgcgtctttctgtcctttctttctacttggttttgttgttgttgttgttgttgttgttgttgatgatgatgatgatgatggtggtgatgatgatttattgagttttgtttggtttgttttttacgttcttatattttggcctcttgaaagaaattccatgaatatttctttgagtaacttaatttcttgtaacaaacagaattctagaatttgcatctctgggacgatgtttgattggagtttggatctctgtggtcttgatgtttattctctggtgtttatttttttcactttgaacataatatgtttttaggcttggttggttggtgggtttgtttattgttttttggggggtgtttgtttgtttgtttgttttggttgattggttgtttgttttatggcttatttgggggggtgttgggtttttgtttgtttattttgtgtgtgttttgttgttgttgttgtttttttgtttttttcaagacagggtttctctgtgtagccttggctggcctggagctccctctgtagaccaggccatactcaagctcagaaatccacctgtctctgcctcctgatgctgggattacagacatgcatcaccactgcccggctcataatgaatttctttataaatgaataccacatgaaaatgttgctcttcttcactgttgctaatgtatgaagaataattaaaacccataaacaaccataaaatattcttcctctaatagtaacatcgttaaatgcataggtcttggaacaggtaaaagggttcgctggatactttcctgtacacagagcccattgccggaaaatgtttttgaataagctacacttctcttctatagtaagatgttaatcagtaataatccaaagagcttcatgttattgactattgttttggttttttttcctctaatcccagacataccaagtggatctgaagcccaacgggtcagaaataatggtaaccaatgagaacaaacgagaatacattgagtacgtatgcacgtacttatcacattttcttctagtgcgtgttgtgtgtgtgtgtgtgtgtgctgtgtgtgcctctgtgtctgcaggtatgcaggcatggggaagggacagaggtcagtgtcctgtcttcctcagtcactgttcatcctattcttatttttggaaatggagcctctcactgaacccagagctcatcaattcagccaggtagcctatccagtgtgctccgtggatttgctgtctccacctctatgcagaaggagcacacccctgtgcctggctttttggtttcttccatgggtgttgggaccagaagtcaggtccttccttacattcgcatggcaagcacttgagcaattgagccatctccccagtcctttccaaaactgcttgtgcatactgagaatgtgaacttaatatcattttgtttgtttgttttggagacaggatctctctattatgcagctctgactatcctagaactcactctgtagaccaggctggcctcgaattcacagagatccgtctgctgcaattaatggtgtgcaccaccacacctggcttctcatttaaacaaaagaaatgtcttttttgcttggcctactaggctgttaagtgtgggaaggaaattcaccctctctcatggcttctgtgaactacagcagcaaaaagaaagggtgcattatagtagcgtgccaggtcctcttcagggatggatagcttgtctgaaattcagaattgcagcagtggaaatgtcagatactaatggggtagaaattagggattgccgtgtgtgtgtgtgtgtgtgtgtgtgtgtgtgtgttttctatcctctgacttgctttccatgctggaaactgagggaaatattgcaaacatgctaagtcgatctgatagttgctgtgtctcaatgtaatctcagcctcttgctgtggaacaaatggttgagtccactcatcttcagtattaacaagtgttagtgtgggccagacacagtagcacacacctttaacctcagcactgggcaggcaggccctctctcaaattttttttctaaaatctcagtgtatatactatatggtatgataatatacccttaacaaccatgtgcgtaccgttcacttgcaagaaaatgagtggatatgagtgatcacatcctgacttttttttttttaattaagagatctttacatttttttatgtgtatgggagttctgcctgaatatatgtctgtgtaccagtgtgtggctggtgtccttggaggcaagaagagcgtcagatcccacgagactagggttacagacaattgtgagctaccacgtgggtgctagaagtcaaacccaggtccgatggaagagcggccagtgctcttaaccaacaagtcatgtctccagaccaccatctcttcacatctgtggagcactttgatcccctgaggtctgagataggccgggagactcactatgttcttggcaacctcagagcatggatgtctcatgatggtgtggtggtggctcttaaaggaatgcagggcttcacagtgggcgggcccaagcaagctgatccctgcctcaccctgttgttcagggttctctgttcatccctcgaaaggagcagcaggccccaggcataagaaaactagtatcagtggacgacaggggtgactaactgtgtgcctttttctctctcagcttagtcatccagtggagatttgtgaacagggtccagaagcaaatgaatgccttcttggaggtaagccctgctaatggggtcaggatggggacagagccatcacgggctgctcactctgttggccctttcccaagatgggactgttccatgacatgctgccttcttcttttctttctaaagtgttctcttgctttgcttctctccattttttatttgttttaatagcattgctgcttgcttgcttgcttgcaaacacagtttgtgtagcacatgctgccctgacaccaatggtaatcctgcctcagcctcctggggctaggattatagcgactggcttcccacctgtatttgtttgtttgccttgaatttatttatttatgtgtgtgcacacacaagcatgcaaacccacaggaggatcgcagcacaactccacagagttggttccctccgtccaccatgtgggtcccagggatggaacttaggtcctcggccttgatgaccagcacagttacaggctgaaccttctcaccaccagacgtttccacacctgctctagagccattaccttgaatttctaggagtatctggaggtaggagaagtgccagtagtggtacctgctactgtgcttccaaaaattgtgctctctctctcagactccccgacccaggcatactgaccttccctacagagccctcccctgtgtgactctaaacttcctgtagattgtcccctttttattctcagggcttttatgttatatccagatgccagctttctccctgtgatggaataaatgaagccaccacctctcctatgcatagtctaccacaggggacattccccaaccccttcgaatggagggggtctttaccataaaaagcatttcatgttggccaacgtgaaattcctttttaataatgatattcgttgtttaaaagcagcccgaaggactggtgagacggctcagcaggtaaaagtgttcgtcggtcaatgcaaagcctgaccacctgaggtcaagcccccagtgccactggtataaggagagaaccaactcttgcagagttgtcctccgcctccacacatgtgtgtatatgcacacaataaataaatacatgcatacatacatacacacatacataatacatgtaatatatcatacattcatacacacataatacatacatatataatatatatcatgcatgcatacatacatataatatatacataatacttatacatgcatacatgcataatacatacatacatataatatatgcataatacatatacatgcacacatacatacataatacatacatatataatatatacatcatacatacatataatatatacataatacatatacaggcacgcatacatacataatacatacatatataatatatacatcatacacacatacataatacatacatataatatatacataatacatatacatgcacacatacataatacatacatctataatatatacatcatacatacatacatacatataatatatacataatacatatacatgcacgcatacatacataatacatacattcacacacataatacattatatatatatatatatatatacacacacacacacacacacacacacacacacatacatacatacatacatacatacatacatacttacttaaaggaaaaacccagaccccctggtagtcatttccagagtcatttcctatttcctctctcatcaaacagctctcttaaactcagccctgccctgagcaggaagtgcacagacatcagggcctaaggatgtaagctgtgagggtgaacttggccttggcccattttgcactaagtttaaggaagaggtctgaggtagcagattcccagccctgcccagctttgggggaaccacagagttgagagtctcttcccgggtcaccctctaactaatggcagcccaggggccagaggctggcttgttttcctgtcagtcctaaaccagctcactcagtcctccacccatgccttcagcgtgctatttttaagcgtgcctctcacacatttgtggtctatgcacggacacactgactcacaaaagtgtgtcataagtggcttttgcaatccgactgcctacggcatccctcgtaccacagggtttcaaaaagtgctcaagtgctggaagctgctggactggacgcattctcacgtcctgtacaagacttgctattattggaactgtggccacctgacactgttgttgccgcgtgagccagcagtaaagagtgagctttatctgaccaactgcaatctcatttgatccaggaaatcgttctttttttgaagaaaagggtgcttaagatgtttttatcttttcctttcagggatttacagaacttcttccaatcgacttgattaaaatttttgatgaaaatgagctggaggtttgtgttatatttttttacataatataaagtacatgatcttaattaccaacttactttgtaagtggcattttgcattctctgacacatgacatattgaatgcacatggatggagtctagtgtgtgctctgttgtgagaccggtcttctgatctggggaggcttagcaatagtcgccgagtagacttgttgactgtgacagtcagttgtgcatttctagtgaagagagagttctcaacctgcatgtcccacaccgcttacatctgatcgatttccttgctagttgctgatgtgcggccttggtgatgtcgacgtgaacgactggagacagcactctatttacaagaacggctactgccccaaccaccctgtcatccagtggttctggaaggtaacgccagctctctaggcccagcctctgcttccggctcttcctcccagtcagggctgaagtcctgagctctgtgtgaggcccctgctgggaggtcagagtaggaccaccctcaggcatgcactgcctcatccctatatagaaatcattttctcaacttttttcccccatagccattttgatttttttttttatgtcttgcaaccaaagatgcaaattaaattcgatttaccatcccagggccagggtttctagtctgttgggctcagaaaagcttcggcaaagacggtaaactaaacaaaaacaaaaaaaaccccagctaattcctctaccaaaaaagagttttaattaaaagattatttacatataaaaaaggaaatcaggcctgcctagtagcatgtacctttttttgtttgttttagacagggtttcactatgtagcctaggctagcctcaaaatagagactcacctgcctcggcctccaaagtgagtgtggaataaaggtgtgtgccactaaaactagcagatgttgactttaaaaaattaggaaatcaactaatatgttctaacttctgaatgtctgttattatatgtcatgtgctgatgagatacagaggggaagaatcataattttcaaagattaggacttagctttggttttggattgtcttatagcggatcaaatcacttgcccaggaaagccaggtcagttccgggaggcacacagatcgggtcacaggcccatgtatgactctggtttccttctatttgtaaaatatcattggggaactttctgtggtcctatctcatcacttggcttccccttgtttagataagtctggaacactgctggttagaactggcttcagggagacaccagatctcaaacgcagaaacctaagcttgaccccatcaaagggttttctttttatatcatttattttggcctgctggcaaaagaaaaagagacccagacattctaagattagaaaggctgggattgtagcgactgttataaagggtgagacaatgccggtcttggtataggtgactccatgcagtgtaaacgagaatttggttgcctgcctgcgttacagcagggtgtggtatggtatgtgctgcatggtgacagtgaccctctgcctccgacaggccgtgctcctgatggatgctgagaagcgcatccggttactacagtttgtcacaggcacctccagagtacccatgaatggatttgccgaactctatggtgagtatggcatgccccagagtcctctgtcgtcctatgaggacccaagcaggcaatgaccagccatctcggcccctttccagaccacatgtatctgtattagttccacagagacccacggagatgcagaacagagggcttcaacccacaggaactgaggcggtgttcctacagagaccccctctctttctccccccaccccccttcttcattgttcaggttttttagtttggtttataaaaccagatttttcagaatcacccatatggttgaaagctccctcctcccagactgcagggctctttttgctccatgcatcaaagctttacattgcattactttcccctgaggtagaagccgtgcagaccgcactctgaggttccttctccctttccctaagtcccaccacaacttcgttctactgcttcaagcccactgatgcatctttttccttttctttttcttttgtctttttgcccaggttccaatggtcctcagctgtttacaatagagcaatggggcagtcccgaaaaactacccagagctcatacatggtaagtcacccaatcctcctgggggctggagaggtggtttccatttgccctctgcagaggacttgggtttggctcacagccctgacctggtggctcataaccatctgtaactccaggtccaggagatttgacttccacggggcaccaggtacacatgtggcgcacatacacgtaggcagagcatgcatacacataaaaatgaacctaaggctggcccggtctcaggtgccagcggggtgaagccatcatgggagcatagtacactgagctctgcccacccacagcttccagtgcagaagaacagttgtgtaagacgacaatgcaaatctttccataaaggggagcgaagcttaagccatgacttggatgggtccagtgtccttgtaggcggaagagtttaagtctccgtgctcccaggaatccccctaaaccatcttcccaactatttcagagcaggggctgctttgctcactgtctatgagtacgacagtccccggcctctcacacacttggactttttttttactctcactttaaattggttgtttcaaaataaggctaagagacggtgatggttctcctgccatcaagcctgacaacctccgttggatcactgagacccacagggtggagcgagagagagccaactcctgcaaactgttgtcccatctccacatgtgtgctgtggtatgcgcacatgcagacaacaaacaaatgttttctctttttttttagtaaaattaaggacaaaattccccatagcgacatcaatttaaatggccttccattcacacagtctgagtgacccatgagctgtggcaccatcatgtctctctggctggagagggaggaagaagttcaaggaattggcttgagaagagccacacaacacccaggacagggacagacaccgcttaggagattttatagcagcattcagcaagctccttctagtccaaactcagttgggctcccgtgtttctgcacaggctttggcttcccccttgctttgtagaaggaggagggtgtggccctgcctttctcagcatggtgagcatgctgagttgatgtgagcatcctttctcacccaccgtctcattctttaaatgctcttgggctgggtaagagagagcattactcaataggggtgacttgccttacttgacatcttttggtcacttgctcccaccccttttgcatatatcctgatccaaccctcccatgctcctgggagcatgtctctcccttttgcacttgaacagagtcagagaacttagatgacgtgcccaaagtcacagattgaaaaggcaggatttgaatttgccccgtaaacaaatagccttgatttcttgcagaaggcatccatccatattcaaagacctcattcttgaagggtgcgctatatcctccccaccccagctgaagccttgttgttaagtagcttttaaagaatgcagctctctctctcgctctctctctctctctctctctatatatatatatatatatatatatatatatatatatatatatatatatgtatgtatatatatatatatatatatacactcactggtagccaactgaatagcagaggtgactcagttttctggagcccagaatagcctgggctctgttctaaggtctgcaacactcctaggaatggggccccatggaaccttggccttaccctcttgcgtaaggatctgcatatattcatgactggggggaaaatatatatgtgtgtgtgtgtgtgtatgtgtgtgtatgtatatatatatgtatatnnnnnnnnnnnnnnnnnnnncatatattcatgactggggaaaatatatatgtatatacatgtatatatgtgtatgtatgtatgtatgtgtgtgtatatatatacatatacatatatacactcacacacacacatatatacatatacactcactcatgctcagaacacacataaccttagctgcttcacacctacaacagttgactcaggcatgatggagcagagatagtatgagtagtagtctgtccatccttcatttctgaggtgtgcatgcctcgtgctccatgagttttctttataaaaaaaaagggggggtgttttttttttattataactctgtgtgtgtgtgtgtgtgtgtgtgtgtgtgtgtgtgtgtgtgtgtgtggtgtggtgtgtaggaaggggtgcacatgctaccagtgtggtcagaagacaactctgcagtcaattctccctttcaccctcgagtggcttctggacattgaaccaagactgcaggcttgcctgctggaccatcttaccggcccacatgtttagtctgtatatgttggtgcttgtcttgtctttgaatctccctcccagcagcagcaaaggagtcatggacagttggaagattcctttcttttccctgttggtcgtatggcctgtttggcataggcactgtcatagctagaatttggctttggataataaaatgcgactgtcttcttaattccctagctcaaacagccaatgcctattagccaaaaccagggagtgctgctatggccaggagaatggcggcccctcacctctactttcctttcctttggcagctttaatcgccttgatttacctccatatgaaacctttgaagatttacgggagaaacttctcatggctgtggaaaacgctcaaggcttcgaaggtgtggattaaggaaggctccagcgtccggggcactgcccttccagcaagttccaagcgcacttttgcatttgccgagcagacttttgcagagccggtggcagaagcagtggcctggcccggctctggagcccagcttgtctgggccctgcccaagttccgccagggaacccagccccagctcaagtgccgccccctcaccgccaattctcaactggttgccgtgtacactgattacatttcaggaggacgtgttctatttatgttgtgcctctgcaggcaaagcccttaataaatattttgcatactttctaatgacaatgaatggaattaatcacgctacaggtatagtattacaactcatgtttactttttaaaatgatttagactgattttcagcttttatttcattacaattaaagatgtctcatgtacttggaaaagtgagcatattttttttttgtatttgaatttcatatcaagcttaatgtcagtgacatttttttatttttgaagtactttgacactcccagcctctactttattagaattggaagacgaatttttcttcaaaagccttctacagacaaatacttttgaaagaacttcaaatataacattaagcataatattttttccaaactcagaatgaaaataaactggatattactttttttttttttgtacaaatttagatactaagtccaggctggaagaattgtaacatagcatgatatctttgtgttaacttgaaaggactgaccccattgtcccttagaagtactgacgtgtgccatcacgcatttaagacaggattggactgtcatctcgcatcagaaaccgttacaatttcctgttgctgtacagcctcttctgaactctcttctctctttggtgttcatagagacatttccaatggcattgcttgattcaaaaccaaggaaaccagaaccattgatcttctatctctgtgattgctaagcagtagccaaataaccttcctttgctgtatctgcgtcccttctgaaggcactttatggaggtcacatctggttttgtttccattttttttttttttttcacgaatatcactcgtggcgattgctcctgcctccctgcacaagtctatccggtgcggtatctatcaggtgtgaacttggctgctagcgtatgaacccagatgtgacgcagagcctctgcagcgatcttctccaactgttctgtaatctctactcaacaataaggttttagttactgtatacacttaaccaagttgtgtgacctatgacctactttgcatgctctgatactgtgtgccgcccccacccccaccccccaggtcgtgtctgttgtgtgctagtttaaaagtgacctagaaagcccagtaggaaccacagagctcaagctgtctggctcaagtggtggaagagtgagggagtctgcagtttgtaagtctcgttctgttgtgttctgagaagatgcctgaggcagtatgggagtttcaacacccctgctgtccctttaacttgtattgtcctagaccctgtcctggaagttagaggacgtggggtatttttttttttgatctcttgccagttgtgaataagacagaaagactgtgttctctgttacgtaagaagggtctttggtagaagaaattgctcgtgtttacacagctgtggatgccatgaagaagccgtggacattcttggtgggtgaagccctagacgatggaatcctaccaagctgaacgtcggcttctatccatatgctatcgagtaattatagaagcaattaacactcactgttcttgcctctggtgagatatttttctcctgtagttaacagatattgggtggggggaggggagatacttttttttttaataaccttccaagtccagaaccatctctgttatagagtgtgccaaagcctgagctaagcagtgtattttaatcgaagaagaaaccaaaatctgttctaagaactggggttctatacctctgtaggccctttattgaacagcattattcactagatgcaaagggagccagcaagatggctcagtgagtccgggtgcttgtcacctagcctgacattctgagttcaatccctgggacccacctgataggagagaactgacttctacaagttgtcctctgacccaatagatttacaaacaaacaaacaaaagattaaaaataagaaaagaggacttaattctgatcttttctaagccaagagcagaaaagacttcttaaatccactccagggaatacttgaaaggcaagtcattgtgactaacacttcagttcattggcccatgatcatttcagattttaacagctgttactgttattggagatcggagagttggcctgttagaaattaaaaaatacagtacagcttgccgttcctctggtttgtgaagtttcactcgttgcctaaaatgcccgatgcctcgtctccagaccttgctgcccttgcctggtcatctttgtacagtaattgtaaatggcagtggagactatggtgttcctgaggggcaatggcaggtcactctcccgatctccctactaccagccaggtgctgtttccttctgagctgtggagatcacaccatcctgtcgccctgcagataattgtggatcatttaccttgaggctgcagagtgggttccaggactcttacttcactgtggagggacttcgagcatcaggtggctctctcatgttcctgccccctttactccatgccaaacttgggattagacagcctgctggctccagaaaaaaggtcttggtaggcattagtctatcctaggtgcccccagtgcactgtccttgtctgtctgaagcacccatctctaccttccctggccagtcctgacggttcacaagggccagagatatggacttcatttttgttcccaggactgatgtagcttagtggcaagtgtctccctggcatgtacttagctgtagatttgatcctcattgctgggactggggacggggtggataagaaataaaaattctgtttctgaggacctttagcaagagacagaaaatcctgccattccagttggaaattatataaaccaacatgacaagaactgtttccccccaaaaggcccagcagctgacttttagaagtgaggttcaaagtctttaaccacttctgaatctcatatggcctgttgctcttgatcttgctagactccggtttgttctaagagtcaggcttacgtagtatagcagcttctagccagttctctattatcctggtaatattgtttctcagctctgaaatttgaaagtctacgaagaaagcctgggttcatcagctgcccagccccacctctccactgagcgctctccatctccctctctccctctctccctctctccctctccccctcaacagaaggaagaaggctatctgttgtcattctcttcctggccagtaggagtgctgctgtgcagggtcactgcctgccctgctccctctctggctcccagaagatcacatgctacctctgtctcatttacaaattggggtatatcctaagtcatgtcaaactgccgatttcaggactgggatgtgttttaaaaaaaaaaaagagaaaaaacaaaaaacttaaactccactttgtaccttagattttaaaactgggtagaaatgtaatatacattggaccacttttttaagccttaatgaacagtgtatatacatctgtgtatgcacactccaccccagagtgttttcagtgtgccagagaagcagctgtagcgttaggacatgagcctgtctagtgtttcctaggaaagggatagttttctgttggtatagcattttctaaggaaactactcactcagcgcctaccctttgttagaagtgttgacgctccaagcacgcgtgtgaagcaccatgtatcttggccggtttcatatttgtaagaagcaccggtaggaacctaagagcatcggttggagtgtgacctctgatgcccctgcattcccgccactgtgtctctgtgtattgaaagcctctcctgtgaccacagcctgtgttgacagatgtctgtcccctgtgcaagccagtctgggcnnnnnnnnnnnnnnnnnnnnnnnnnnnnnnnnnnnnnnnnnnnnnnnnnnnnnnnnnnnnnnnnnnnnnnnnnnnnnnnnnnnnnnnnnnnnnnnnnnnnnnnnnnnnnnnnnnnnnnnnnnnnnnnnnnnnnnnnnnnnnnnnnnnnnnnnnnnnnnnnnnnnnnnnnnnnnnnnnnnnnnnnnnnnnnnnnnnnnnnnnnnnnnnnnnnnnnnnnnnnnnnnnnnnnnnnnnnnnnnnnnnnnnnnnnnnnnnnnnnnnnnnnnnnnnnnnnnnnnnnnnnnnnnnnnnnnnnnnnnnnnnnnnnnnnnnnnnnnnnnnnnnnnnnnnnnnnnnnnnnnnnnnnnnnnnnnnnnnnnnnnnnnnnnnnnnnnnnnnnnnnnnnnnnnnnnnnnnnnnnnnnnnnnnnnnnnnnnnnnnnnnnnnnnnnnnnnnnnnnnnnnnnnnnnnnncacacacacacacacacacacacctcctaacgcaaagctgagtgctatttgatacaatagtcaaaaccaaactaccttgacatttttctaagacagcttaatggctgatgctcgtcttcacagcccgtggcgggctttaacgtagctcgaatctggtacacgcataaagttttacggtcaagtccttttctttcttcttgagagacctaaagagatactgtagcttgtttttctgatggcaaatgggaactgtgacaaagtgaagtccttgtaaagcggtgatacaacttgtcaaatatttaataaagaattacggaagctggaacatttcctacataagtatcatgggttgtctggcttaaagcttcttcaggaatggttcatttcaatcacgtcagatatttaaatgactgcagattttaggtgtggtcatttccttaatctgttatacgagccccaccttagcgatggagtctgccctgagttctcattataaggctcatttgcccccatgcacatgctgggttttgtctttttttttattaaacctgagcattgcccgctttatacagcactcatggttttatcactccatccccaggaaagcaaactgacttcacctctgcttgccagtgtgccccggactgggagacggtgaatgacattagcaaccaagccacggtggttctcagaaagatggtctggatatccagatgtatgaaaggttttccactaaaattcaatctcttgggactggagagatgacccggtggctgcttttcattagccaattagtgctttcccagaagtcctgagttctctaccggggctccttgggcccagggctggatagaaggctcagtgcctcaaagagtgtcctttcagcactgcacctttgcagtggctgcccagaggccaccctccctccaggttgtgccctgtgctgtggtgtctctctgttcttttctacttctgagcccaagctggctcaggctgccttccctctggctgcaaatcccagagcaggaagggtggccctgggagatataaggtgagtggagactgtcacctgcacctccagtagagtgccttgaccctgctgaagacaacccaagcttgtcaccttaggggtgctggcctcagtccttggagacatgaaccctgcaatgttacttcttgttggtgctgctgaacttgccagcacgggagctgatggcctgttctaagcacctctataggccctatccccagatgctggtagaaaatctttgtcctctgtaaagaaagggcttaccttacaaatcagttcaggggtgtgggggagtctagagtagccaaggggtctaaagggagagttcagatgcggtaagagaagcctattgcttgggagggaccttggttagctgcatagagcagcccctggcatcactgcatccctggcttggattgtcattccagaatgctccttcatgccacctccaagtcagtccccacccctacatctcaaagtccttctgaattttccctaacacattggctttgtcttatctagaatttcccgtagaaccatataacttactccgatgtttgtttgttttttcctagttggagtagctgtgactctttaacctcataacatttactaaaccagacctgaggatgtagctcagttggcagagtgcttccctcctatgcacagaagtcctaggtttgggtcccataactacgtaaaacagcataagcgtgcatgtccgttaatctcagggagaagcagaagttcacatgtcaagttcaataccagtgtggcctactcaagaactcagttcaaaaaaaaaaaaattttttttttgttgttttgaatgggagcccgaatagcataatgaatgggggagggagtcaatttaatattcagatagtttaccgatttcacatgaagtgggtcagtcaccactttcagactagatagtcaccttgtagattttaaagcttacagtgatcctggccttcaggttgaaatataggtttaccttgcagtggaagttcccaaggaatcatagatggagtgaggattgcgctccagatttctagatcttgtctcacttcttctctctgaaagatcctcgagtaagaggaaatgagttcattagggcagattaacacagtagcaagcagtgtgaagatggcatgcaggggcttgcttgacagaagcttatgtcccacaatcctttgcaggtttaaacaggtactccattctgttgtcattcaggtgcccaggcaccctccctcctcagccccacaatccccacaggatgacagagcctggggaaggaagagtctggggggtggggcatgaaagcaaaccccctctgcccaggtcccctggccagaagcaggaccatagctgtagctagatgcagaggagtctagagacaatcctgcagagatggtttctcctggaaacagaggccttgccgccattcaccaagcctccggagtcttccgtttactctctggactctgctgcatagttcatggatctctgtttgagcccagtgataatgttagcacgaatttacgtgcaaggaagtgaacttgcagagcagaactagaaacccaggttacctgggtaagaggccaccactcaactactgactgtactacctagcttccagctagtccaccaaacattccgaaggtaaaaataccaatcaactcatttatactaggatgtaaggatccagttagctagacacagaagtagttttattttaacaactactaaagatgatgcttagttcaaaaataattttttttaaaatcgaagttatgccctttagttaccaggacagtgagcagagaaggttttggtggacaaaggggtctatttcagccactaaatcattgcaaatatgaagtatctacacaacttgaaagaccctgtcccagatgctggcctccagcatgaagccagggcctcccaaaggacatgtaaacatccttttgtgcaacagaacaaagagccaaaggggctagacatggaaaactggaatttccactctaaaaaatgcttggtaggggcaccacactgttgtatttgtagaagagtttctatctgatgacaaattttagatgttaacttgtatttaagtactgctggaagcctggcacgggctatgcctgtcacctagcttttcctttcagttctaaggcctctgccccggagtcctcctccttcagtccttcctgctgggctgcagtctctccttggccctctgtcctcttctgcacggtctctttactttagacattcctttgctggcttggcagtgacgttgggagaggccggtggacatgtcatcctcatatatcgagtgtgtaagcaacagccaggcctttgaaccctgggttccagttaaaaagtaacacactagatgctggatcaagaggagacaaatattagctttggaggcggagagcctcatcattgagaaatgtctgctgttggcaacaggaagagagcaatggtcacgccagagtgggggatccaggaacccccagattcctgcgaccttaggctagacactctattcttttatttaaaaaaaaaagtatttattttcaggtgtgggagggggacttgccacactggacatatggaggtcaatggacaacgtgtaggtgttagttctgtccctgtacaatgtgggtttggaccagcaggcttgacagcaagtaccttcaccagatgagccacctcttggcccagacactgtattctacaagttgaacattgaagcggccagtccttaagttccctcctagaactcccttaatctgagagccccaggactgtcctgtgaccactttgtgcctctgtcctttgtcacctcgatttggcgacccagttctgtcacttgtttgcagccaagctccgctgcctgctaggagcttccatacatcttcccactctcctgcctactgcctgagtcactggagatgtctaggaggacagcagagtagcaggtctccatggatcaaacccaacagctccagggatcaaacccaacagctcaacagcctcgggccccagagaccactcctaccatgcttctctgtggtttccaatgaccctccttatttaatatgccactctcaagcctctcctctcaaaatatacatgtgcccacaggttgtccttagtaggcttgctatctccccattgctctccttccctgctacctctctttccgtcacaggtccctggggactgtcacatctatctctagccccaacctctcttcagtctctcatctccaaaaccctaatagacactatcaacagacatctccaagtctctcaaactcaaaaatgtagccctgacctcacaccagaaactccatcaatggccttccatgcatctttgatccccaagtaagaagtatggcaaggtagggttccttcccgtgctttcgtcattcaccccacagttcccagaacatccggtgcttgggggcaccaggcaggcacgccagcaatgaaggagagtaagacaactcctttgtatctcatgtctgagtggaggcaaacaagtaacatgtaagtagatacaatgtatgtggtgttactaatgaagccaaggcagacagaggctgcaagtagtgtaagtagagtttagatcctatgacaaaacaagatggagacctggaagcagtggaaaaagccaactatgggtccactggagcatgaggttgaggagcaccctcagcaaaggccctaggtggaggcagagaaaactcaagttagctcagctagagcccacttagaaagggaaacccagaagtttgagtagggccaggccaggccttgcaggattttcatgtcataagcacataaatggtattaatgacttttaatttttcatatttaatgtttgggagacagaggcctgctgcatagcttagattgttctaaaacttacaatcctcctgcctcagtctttcaagttctgggatatcacgtataactacacacaatagcatagacagcattttaaacttctatgaggcagaagggggggggcggggagacaaagccagaggagtggccagagaggtagcagggaaagcagaaaagagtgcattctgggcactgaggcacaggcattcatcactggcaatggggagcatctgcgagttctgatggctggccagagagacaagagcttaagtggccacggtaactggcaacagggtggcccagtgaccttcacaggaacggcttggtcaggatgctgacagtaaacacctgatgaaagagatctctgcaagaaggggagaaggcactgggtcagcagggacttgtgcaacagctagcacaccctcgctccttctgtccccgcagccttcgacctcacattcttctgcacgctccacccaagtgtgacagtcacctgatgacagtgtctcactatctctctcctgattctctcctgtgcccagtttgcacacagttcccagtctagtcagaatctgccatccgcctgcccatacagagacttgccaatatccaccaggaaaaacccgaagcccttctcctccatcttcctacagaattcagaaggcaccatccggacttagcccatgccatggttccttcctgctttggctcgctctacaaactctccaaggaacggacttcccacgcatccaaaccaagttcctgtcatctcttcaatgtcactttatcctccagtcctttctgatgacccactaactgaagcgtcacacttctttggacttatagacctttgtcactttccacctgtagtctaattgtctcagccttacccgacaccaacagcagactaggggtcagctgttgcctccatgcctggcttctcagtgaaactcaatttcagtgctttggacagtgggaagtagaggaagacattggctatagtcaggatggggcagtctggatttcagttttaatgggtctgccttaccctttcctatgttttattcctcctgaataaaccgtcaagcctggccaagctgccaaagacctccaccatgtgaccctgacagagaggactaatagtctgtaaatcctttgtgtgtgtgtgggggggggggtgtctggacaaagaataagagaagacaagatgacagttagcaaaacacaccaaccagcaggcacactgtgagcacttatcaacactccagaggttcctagaagacaaccagaaattcagctgccctttctgtgtctccacttctctttccaaggctccaggaccagcaaccatgtcagtctttagaaatgacggtttcccaggaagccattgcctcttgggcttggctagggtcatggttgtgaggactctagcgcacagaaaggaggtggcctggaacagctaagcctgctctacttaaggtgtggtacgaagttgtatttgagaagggcaggaagatctcaggaattcccagtgggcttctgagaggtcacatgcagggagagcactcagttcatacggagacttaaaagttgcaaaaggacgggtgagtcaaaacttcattgcccgtgatctctatttggtcttccccgggctttttaaaggatggtgttggcatctaaatttcacatctcccctttctctctaaagccttgggaccaatccaccggccctgaatcatgcctgctcc

SEQ ID NO: 340 - DNA, 3693 bp, Mus musculus
gtttggctgcagggcagcattacagagcttgagttgttccctaggtctctggaatccaccaagttccgcctatagtgtttggccaggctgcctctgggatgagctgtttctgtcttccccacgtttgaattcgctcacgctttgagacaggcaggcatcagcaacagcagtttttagcccagacagctctcagcaccgtcagctcagcacagcttcagagggctctgcctggtgggaagctctgcagggctctacctgggcagtagctacagagccctcccctctcagcaccttgctccgcccactcgttccaggctgtcgattgccggtagggaaactggagagaccaggattcctcttccattcttgctgttgttaaggaaaacagaccaaccatctgcatctagaccagccttcctctccctcgctcccttttagaggaggttttcctgcctggaatctgcgacccatacgtgaagctgtccttgtatgtagctgatgagaatagagaacttgctctggttcaaaccaagacaattaaaaagacgctgaacccaaagtggaatgaagagttttattttagggtaaatccatctaatcacaggctcctatttgaagtatttgacgagaacagattgacacgagacgacttcctgggccaggtggacgtgcctcttagtcaccttccgacagaagatccaaccatggagagaccctatacatttaaggattttctcctgcgacctagaagtcataaatctcgagtcaaggggtttttgaggttgaaaatggcctacatgccgaaaaacggaggtcaggatgaagaaaacagcgagcagagggatgacatggagcatggatgggaagtggttgactccaacgactcagcttcccagcaccaggaggagctcccccctcctcccctgccgccaggatgggaagagaaagtggacaatttaggccgaacttactatgtcaaccacaacaacaggagtactcagtggcaccgacccagcttgatggatgtgtcctcggaatcagacaataacatcaggcagatcaaccaggaggctgcacaccgacgcttccgctctcggaggcacattagtgaagatttggagcctgaggcctctgaaggcggtggagaaggccctgagccttgggagaccatttcagaggaaatgaacatggcaggagattctctcagcctggctctgcccccaccgcctgcctccccagtgtcccggaccagcccccaggagctgtcggaagaagtgagccgaaggttgcagatcactccggactccaacggggaacagttcagttctctgattcagagagagccctcgtcaaggcttcggtcctgcagtgttaccgacacggttgctgagcaagctcaccttccaccgcccagcaccccaactaggcgagcccgttcgtcaactgtcacgggtggtgaggaatccacgccatcagtggcctatgtacataccacgccgggcctgccttcaggctgggaagaaagaaaggatgcaaagggacgcacatactatgtcaatcataacaatcgaaccacaacttggactcggccaatcatgcagcttgcagaagacggtgcctccggatcagccacaaacagtaacaaccacctagtcgaaccccagatccgccggccccgtagcctcagctcgccaacagtaactttatctgccccactggagggtgccaaggattcacccatccgccgtgccgtgaaagataccctttccaatccacagtcccctcagccatcaccttacaactcccccaaaccacaacacaaagtcacacagagcttcctgccaccaggctgggagatgaggatagcccccaacggccgacccttcttcattgaccataacacaaagactacaacctgggaagatccacggttgaaatttccagtacacatgcggtcaaaagcatctttaaaccccaatgacctgggccctcttcctcctggctgggaagagaggatccacttggatggccgcacgttttacattgaccataatagtaaaattacccagtgggaagatccaagactacagaacccagccatcactggtccggctgttccgtactccagagagtttaagcagaaatacgactactttaggaagaaattaaagaagcctgctgatattccaaacaggtttgaaatgaaacttcacagaaacaacatatttgaagagtcctatcggaggatcatgtctgtaaagagacctgacgtcctaaaggctaggctgtggattgagtttgaatcagagaaaggcctggactatgggggcgtggccagagaatggttcttcttactgtccaaagagatgtttaacccctactatggcctcttcgagtactctgccacggacaactacacacttcagatcaatcccaactcaggcctctgtaatgaagaccatttgtcctatttcaccttcattggaagagttgctggcctagcggtgtttcatgggaaactcttagatggattcttcattcgaccattctacaagatgatgctggggaagcagataacgctgaacgacatggagtccgtggacagcgagtactacaactctttgaagtggatcttagaaaacgaccccacggaacttgacctcatgttctgcatagacgaagagaactttgggcagacataccaagtggatctgaagcccaacgggtcagaaataatggtaaccaatgagaacaaacgagaatacattgacttagtcatccagtggagatttgtgaacagggtccagaagcaaatgaatgccttcttggagggatttacagaacttcttccaatcgacttgattaaaatttttgatgaaaatgagctggagttgctgatgtgcggccttggtgatgtcgacgtgaacgactggagacagcactctatttacaagaacggctactgccccaaccaccctgtcatccagtggttctggaaggccgtgctcctgatggatgctgagaagcgcatccggttactacagtttgtcacaggcacctccagagtacccatgaatggatttgccgaactctatggttccaatggtcctcagctgtttacaatagagcaatggggcagtcccgaaaaactacccagagctcatacatgctttaatcgccttgatttacctccatatgaaacctttgaagatttacgggagaaacttctcatggctgtggaaaacgctcaaggcttcgaaggtgtggattaaggaaggctccagcgtccggggcactgcccttccagcaagttccaagcgcacttttgcatttgccgagcagacttttgcagagccggtggcagaagcagtggcctggcccggctctggagcccagcttgtctgggccctgcccaagttccgccagggaacccagccccagctcaagtgccgccccctcaccgccaattctcaactggttgccgtgtacactgattacatttcaggaggacgtgttctatttatgttgtgcctctgcaggcaaagcccttaataaatattttgcatactttctaatgacaatgaatggaattaatcacgctacaggtatagtattacaactcatgtttactttttaaaatgatttagactgattttcagcttttatttcattacaattaaagatgtctcatgt

SEQ ID NO: 341 - protein, 847 aa, Mus musculus
MERPYTFKDFLLRPRSHKSRVKGFLRLKMAYMPKNGGQDEENSEQRDDMEHGWEVVDSNDSASQHQEELPPPPLPPGWEEKVDNLGRTYYVNHNNRSTQWHRPSLMDVSSESDNNIRQINQEAAHRRFRSRRHEDLEPEASEGGGEGPEPWETISEEMNMAGDSLSLALPPPPDVSRTSPQELSEEVSRRLQITPDSNGEQFSSLIQREPSSRLRSCSVTDTVAEQAHLPPPSTPTRRARSSTVTGGEESTPSVAYVHTTPGLPSGWEERKDAKGRTYYVNHNNRTTTWWIMQLAEDGASGSATNSNNHLVEPQIRRPRSLSSPTVTLSAPLEGAKDSPIRRAVKDTLSNPQSPQPSPYNSPKPQHKVTQSFLPPGWEMRIAPNGRPFFIDHNTKTTTWEDPRLKFPVHMRSKASLNPNDLGPLPPGWEERIHLDGRTFYIDHNSKITQWEDPRLQNPAITGPAVPYSREFKQKYDYFRKKLKKPADIPNRFEMKLHRNNIFEESYRRIMSVKRPDVLKARLWIEFESEKGLDYGGVAREWFFLLSKEMFNPYYGLFEYSATDNYTLQINPNSGLCNEDHLSYFTFIGRVAGLAVFHGKLLDGFFIRPFYKMMLGKQITLNDMESVDSEYYNSLKWINDPTELDLMFCIDEENFGQTYQVDLKPNGSEIMVTNENKREYIDLVIQWRFVNRVQKQMNAFLEGFTELLPIDLIKIFDENELELLMCGLGDVDVNDWRQHSIYKNGYCPNHPVIQWFWKAVLLMDAEKRIRLLQFVTGTSRVPMNGFAELYGSNGPQLFTIEQWGSPEKLPRAHTCFNRLDLPPYETFEDLREKLLMAVENAQGFEGVD

SEQ ID NO: 342 - DNA, 3441 bp, Mus musculus
ttagtatgtctttatgtgaggctccagttcatgtgggggacaaagagcttaaatattttcaaattccgcagatgctcagccaactcagcttgctagcctcacaccatagcaggggcctcgagttcagcggcggacagggagaatcccgtatcctcagagtaaaagttgtttctggaattgacctcgccaagaaggacatatttggagccagcgacccatacgtgaagctgtccttgtatgtagctgatgagaatagagaacttgctctggttcaaaccaagacaattaaaaagacgctgaacccaaagtggaatgaagagttttattttagggtaaatccatctaatcacaggctcctatttgaagtatttgacgagaacagattgacacgagacgacttcctgggccaggtggacgtgcctcttagtcaccttccgacagaagatccaaccatggagagaccctatacatttaaggattttctcctgcgacctagaagtcataaatctcgagtcaaggggtttttgaggttgaaaatggcctacatgccgaaaaacggaggtcaggatgaagaaaacagcgagcagagggatgacatggagcatggatgggaagtggttgactccaacgactcagcttcccagcaccaggaggagctcccccctcctcccctgccgccaggatgggaagagaaagtggacaatttaggccgaacttactatgtcaaccacaacaacaggagtactcagtggcaccgacccagcttgatggatgtgtcctcggaatcagacaataacatcaggcagatcaaccaggaggctgcacaccgacgcttccgctctcggaggcacattagtgaagatttggagcctgaggcctctgaaggcggtggagaaggccctgagccttgggagaccatttcagaggaaatgaacatggcaggagattctctcagcctggctctgcccccaccgcctgcctccccagtgtcccggaccagcccccaggagctgtcggaagaagtgagccgaaggttgcagatcactccggactccaacggggaacagttcagttctctgattcagagagagccctcgtcaaggcttcggtcctgcagtgttaccgacacggttgctgagcaagctcaccttccaccgcccagcaccccaactaggcgagcccgttcgtcaactgtcacgggtggtgaggaatccacgccatcagtggcctatgtacataccacgccgggcctgccttcaggctgggaagaaagaaaggatgcaaagggacgcacatactatgtcaatcataacaatcgaaccacaacttggactcggccaatcatgcagcttgcagaagacggtgcctccggatcagccacaaacagtaacaaccacctagtcgaaccccagatccgccggccccgtagcctcagctcgccaacagtaactttatctgccccactggagggtgccaaggattcacccatccgccgtgccgtgaaagataccctttccaatccacagtcccctcagccatcaccttacaactcccccaaaccacaacacaaagtcacacagagcttcctgccaccaggctgggagatgaggatagcccccaacggccgacccttcttcattgaccataacacaaagactacaacctgggaagatccacggttgaaatttccagtacacatgcggtcaaaagcatctttaaaccccaatgacctgggccctcttcctcctggctgggaagagaggatccacttggatggccgcacgttttacattgaccataatagtaaaattacccagtgggaagatccaagactacagaacccagccatcactggtccggctgttccgtactccagagagtttaagcagaaatacgactactttaggaagaaattaaagaagcctgctgatattccaaacaggtttgaaatgaaacttcacagaaacaacatatttgaagagtcctatcggaggatcatgtctgtaaagagacctgacgtcctaaaggctaggctgtggattgagtttgaatcagagaaaggcctggactatgggggcgtggccagagaatggttcttcttactgtccaaagagatgtttaacccctactatggcctcttcgagtactctgccacggacaactacacacttcagatcaatcccaactcaggcctctgtaatgaagaccatttgtcctatttcaccttcattggaagagttgctggcctagcggtgtttcatgggaaactcttagatggattcttcattcgaccattctacaagatgatgctggggaagcagataacgctgaacgacatggagtccgtggacagcgagtactacaactctttgaagtggatcttagaaaacgaccccacggaacttgacctcatgttctgcatagacgaagagaactttgggcagacataccaagtggatctgaagcccaacgggtcagaaataatggtaaccaatgagaacaaacgagaatacattgacttagtcatccagtggagatttgtgaacagggtccagaagcaaatgaatgccttcttggagggatttacagaacttcttccaatcgacttgattaaaatttttgatgaaaatgagctggagttgctgatgtgcggccttggtgatgtcgacgtgaacgactggagacagcactctatttacaagaacggctactgccccaaccaccctgtcatccagtggttctggaaggccgtgctcctgatggatgctgagaagcgcatccggttactacagtttgtcacaggcacctccagagtacccatgaatggatttgccgaactctatggttccaatggtcctcagctgtttacaatagagcaatggggcagtcccgaaaaactacccagagctcatacatgctttaatcgccttgatttacctccatatgaaacctttgaagatttacgggagaaacttctcatggctgtggaaaacgctcaaggcttcgaaggtgtggattaaggaaggctccagcgtccggggcactgcccttccagcaagttccaagcgcacttttgcatttgccgagcagacttttgcagagccggtggcagaagcagtggcctggcccggctctggagcccagcttgtctgggccctgcccaagttccgccagggaacccagccccagctcaagtgccgccccctcaccgccaattctcaactggttgccgtgtacactgattacatttcaggaggacgtgttctatttatgttgtgcctctgcaggcaaagcccttaataaatattttgcatactttctaatgacaatgaatggaattaatcacgctacaggtatagtattacaactcatgtttactttttaaaatgatttagactgattttcagcttttatttcattacaattaaagatgtctcatgt

SEQ ID NO: 343 - protein, 996 aa, Mus musculus
MSLCEAPVHVGDKELKYFQIPQMLSQLSLLASHHSRGLEFSGGQGESRILRVKVVSGIDLAKKDIFGASDPYVKLSLYVADENRELALVQTKTIKKTLNPKWNEEFYFRVNPSNHRLLFEVFDENRLTRDDFLGQVDVPLSHLPTEDPTMERPYTFKDFLLRPRSHKSRVKGFLRLKMAYMPKNGGQDEENSEQRDDMEHGWEVVDSNDSASQHQEELPPPPLPPGWEEKVDNLGRTYYVNHNNRSTQWHRPSLMDVSSESDNNIRQINQEAAHRRFRSRRHEDLEPEASEGGGEGPEPWETISEEMNMAGDSLSLALPPPPDVSRTSPQELSEEVSRRLQITPDSNGEQFSSLIQREPSSRLRSCSVTDTVAEQAHLPPPSTPTRRARSSTVTGGEESTPSVAYVHTTPGLPSGWEERKDAKGRTYYVNHNNRTTTWWIMQLAEDGASGSATNSNNHLVEPQIRRPRSLSSPTVTLSAPLEGAKDSPIRRAVKDTLSNPQSPQPSPYNSPKPQHKVTQSFLPPGWEMRIAPNGRPFFIDHNTKTTTWEDPRLKFPVHMRSKASLNPNDLGPLPPGWEERIHLDGRTFYIDHNSKITQWEDPRLQNPAITGPAVPYSREFKQKYDYFRKKLKKPADIPNRFEMKLHRNNIFEESYRRIMSVKRPDVLKARLWIEFESEKGLDYGGVAREWFFLLSKEMFNPYYGLFEYSATDNYTLQINPNSGLCNEDHLSYFTFIGRVAGLAVFHGKLLDGFFIRPFYKMMLGKQITLNDMESVDSEYYNSLKWINDPTELDLMFCIDEENFGQTYQVDLKPNGSEIMVTNENKREYIDLVIQWRFVNRVQKQMNAFLEGFTELLPIDLIKIFDENELELLMCGLGDVDVNDWRQHSIYKNGYCPNHPVIQWFWKAVLLMDAEKRIRLLQFVTGTSRVPMNGFAELYGSNGPQLFTIEQWGSPEKLPRAHTCFNRLDLPPYETFEDLREKLLMAVENAQGFEGVD

SEQ ID NO: 344 - DNA, 4222 bp, Mus musculus
ctcttattggtgtgttgctctgccaaaaaggggggtgggaggcctgtcgcgggcgcggagtgacaggcaggctgcatggagcagggagaatcccgtatcctcagagtaaaagttgtttctggaattgacctcgccaagaaggacatatttggagccagcgacccatacgtgaagctgtccttgtatgtagctgatgagaatagagaacttgctctggttcaaaccaagacaattaaaaagacgctgaacccaaagtggaatgaagagttttattttagggtaaatccatctaatcacaggctcctatttgaagtatttgacgagaacagattgacacgagacgacttcctgggccaggtggacgtgcctcttagtcaccttccgacagaagatccaaccatggagagaccctatacatttaaggattttctcctgcgacctagaagtcataaatctcgagtcaaggggtttttgaggttgaaaatggcctacatgccgaaaaacggaggtcaggatgaagaaaacagcgagcagagggatgacatggagcatggatgggaagtggttgactccaacgactcagcttcccagcaccaggaggagctcccccctcctcccctgccgccaggatgggaagagaaagtggacaatttaggccgaacttactatgtcaaccacaacaacaggagtactcagtggcaccgacccagcttgatggatgtgtcctcggaatcagacaataacatcaggcagatcaaccaggaggctgcacaccgacgcttccgctctcggaggcacattagtgaagatttggagcctgaggcctctgaaggcggtggagaaggccctgagccttgggagaccatttcagaggaaatgaacatggcaggagattctctcagcctggctctgcccccaccgcctgcctccccagtgtcccggaccagcccccaggagctgtcggaagaagtgagccgaaggttgcagatcactccggactccaacggggaacagttcagttctctgattcagagagagccctcgtcaaggcttcggtcctgcagtgttaccgacacggttgctgagcaagctcaccttccaccgcccagcaccccaactaggcgagcccgttcgtcaactgtcacgggtggtgaggaatccacgccatcagtggcctatgtacataccacgccgggcctgccttcaggctgggaagaaagaaaggatgcaaagggacgcacatactatgtcaatcataacaatcgaaccacaacttggactcggccaatcatgcagcttgcagaagacggtgcctccggatcagccacaaacagtaacaaccacctagtcgaaccccagatccgccggccccgtagcctcagctcgccaacagtaactttatctgccccactggagggtgccaaggattcacccatccgccgtgccgtgaaagataccctttccaatccacagtcccctcagccatcaccttacaactcccccaaaccacaacacaaagtcacacagagcttcctgccaccaggctgggagatgaggatagcccccaacggccgacccttcttcattgaccataacacaaagactacaacctgggaagatccacggttgaaatttccagtacacatgcggtcaaaagcatctttaaaccccaatgacctgggccctcttcctcctggctgggaagagaggatccacttggatggccgcacgttttacattgaccataatagtaaaattacccagtgggaagatccaagactacagaacccagccatcactggtccggctgttccgtactccagagagtttaagcagaaatacgactactttaggaagaaattaaagaagcctgctgatattccaaacaggtttgaaatgaaacttcacagaaacaacatatttgaagagtcctatcggaggatcatgtctgtaaagagacctgacgtcctaaaggctaggctgtggattgagtttgaatcagagaaaggcctggactatgggggcgtggccagagaatggttcttcttactgtccaaagagatgtttaacccctactatggcctcttcgagtactctgccacggacaactacacacttcagatcaatcccaactcaggcctctgtaatgaagaccatttgtcctatttcaccttcattggaagagttgctggcctagcggtgtttcatgggaaactcttagatggattcttcattcgaccattctacaagatgatgctggggaagcagataacgctgaacgacatggagtccgtggacagcgagtactacaactctttgaagtggatcttagaaaacgaccccacggaacttgacctcatgttctgcatagacgaagagaactttgggcagacataccaagtggatctgaagcccaacgggtcagaaataatggtaaccaatgagaacaaacgagaatacattgacttagtcatccagtggagatttgtgaacagggtccagaagcaaatgaatgccttcttggagggatttacagaacttcttccaatcgacttgattaaaatttttgatgaaaatgagctggagttgctgatgtgcggccttggtgatgtcgacgtgaacgactggagacagcactctatttacaagaacggctactgccccaaccaccctgtcatccagtggttctggaaggccgtgctcctgatggatgctgagaagcgcatccggttactacagtttgtcacaggcacctccagagtacccatgaatggatttgccgaactctatggttccaatggtcctcagctgtttacaatagagcaatggggcagtcccgaaaaactacccagagctcatacatgctttaatcgccttgatttacctccatatgaaacctttgaagatttacgggagaaacttctcatggctgtggaaaacgctcaaggcttcgaaggtgtggattaaggaaggctccagcgtccggggcactgcccttccagcaagttccaagcgcacttttgcatttgccgagcagacttttgcagagccggtggcagaagcagtggcctggcccggctctggagcccagcttgtctgggccctgcccaagttccgccagggaacccagccccagctcaagtgccgccccctcaccgccaattctcaactggttgccgtgtacactgattacatttcaggaggacgtgttctatttatgttgtgcctctgcaggcaaagcccttaataaatattttgcatactttctaatgacaatgaatggaattaatcacgctacaggtatagtattacaactcatgtttactttttaaaatgatttagactgattttcagcttttatttcattacaattaaagatgtctcatgtacttggaaaagtgagcatattttttttttgtatttgaatttcatatcaagcttaatgtcagtgacatttttttatttttgaagtactttgacactcccagcctctactttattagaattggaagacgaatttttcttcaaaagccttctacagacaaatacttttgaaagaacttcaaatataacattaagcataatattttttccaaactcagaatgaaaataaactggatattactttttttttttttgtacaaatttagatactaagtccaggctggaagaattgtaacatagcatgatatctttgtgttaacttgaaaggactgaccccattgtcccttagaagtactgacgtgtgccatcacgcatttaagacaggattggactgtcatctcgcatcagaaaccgttacaatttcctgttgctgtacagcctcttctgaactctcttctctctttggtgttcatagagacatttccaatggcattgcttgattcaaaaccaaggaaaccagaaccattgatcttctatctctgtgattgctaagcagtagccaaataaccttcctttgctgtatctgcgtcccttctgaaggcactttatggaggtcacatctggttttgtttccattttttttttttttttcacgaatatcactcgtggcgattgctcctgcctccctgcacaagtctatccggtgcggtatctatcaggtgtgaacttggctgctagcgtatgaacccagatgtgacgcagagcctctgcagcgatcttctccaactgttctgtaatctctactcaacaataaggttttagttactgtatacactta

SEQ ID NO: 345 - protein, 955 aa, Mus musculus
MEQGESRILRVKVVSGIDLAKKDIFGASDPYVKLSLYVADENRELALVQTKTIKKTLNPKWNEEFYFRVNPSNHRLLFEVFDENRLTRDDFLGQVDVPLSHLPTEDPTMERPYTFKDFLLRPRSHKSRVKGFLRLKMAYMPKNGGQDEENSEQRDDMEHGWEVVDSNDSASQHQEELPPPPLPPGWEEKVDNLGRTYYVNHNNRSTQWHRPSLMDVSSESDNNIRQINQEAAHRRFRSRRHEDLEPEASEGGGEGPEPWETISEEMNMAGDSLSLALPPPPDVSRTSPQELSEEVSRRLQITPDSNGEQFSSLIQREPSSRLRSCSVTDTVAEQAHLPPPSTPTRRARSSTVTGGEESTPSVAYVHTTPGLPSGWEERKDAKGRTYYVNHNNRTTTWWIMQLAEDGASGSATNSNNHLVEPQIRRPRSLSSPTVTLSAPLEGAKDSPIRRAVKDTLSNPQSPQPSPYNSPKPQHKVTQSFLPPGWEMRIAPNGRPFFIDHNTKTTTWEDPRLKFPVHMRSKASLNPNDLGPLPPGWEERIHLDGRTFYIDHNSKITQWEDPRLQNPAITGPAVPYSREFKQKYDYFRKKLKKPADIPNRFEMKLHRNNIFEESYRRIMSVKRPDVLKARLWIEFESEKGLDYGGVAREWFFLLSKEMFNPYYGLFEYSATDNYTLQINPNSGLCNEDHLSYFTFIGRVAGLAVFHGKLLDGFFIRPFYKMMLGKQITLNDMESVDSEYYNSLKWINDPTELDLMFCIDEENFGQTYQVDLKPNGSEIMVTNENKREYIDLVIQWRFVNRVQKQMNAFLEGFTELLPIDLIKIFDENELELLMCGLGDVDVNDWRQHSIYKNGYCPNHPVIQWFWKAVLLMDAEKRIRLLQFVTGTSRVPMNGFAELYGSNGPQLFTIEQWGSPEKLPRAHTCFNRLDLPPYETFEDLREKLLMAVENAQGFEGVD

SEQ ID NO: 346 - DNA, 4478 bp, Mus musculus
tttggctgcagggcagcattacagagcttgagttgttccctaggtctctggaatccaccaagttccgcctatagtgtttggccaggctgcctctgggatgagctgtttctgtcttccccacgtttgaattcgctcacgctttgagacaggcaggcatcagcaacagcagtttttagcccagacagctctcagcaccgtcagctcagcacagcttcagagggctctgcctggtgggaagctctgcagggctctacctgggcagtagctacagagccctcccctctcagcaccttgctccgcccactcgttccaggctgtcgattgccggtagggaaactggagagaccaggattcctcttccattcttgctgttgttaaggaaaacagaccaaccatctgcatctagaccagccttcctctccctcgctcccttttagaggaggttttcctgcctggaatctgcgacccatacgtgaagctgtccttgtatgtagctgatgagaatagagaacttgctctggttcaaaccaagacaattaaaaagacgctgaacccaaagtggaatgaagagttttattttagggtaaatccatctaatcacaggctcctatttgaagtatttgacgagaacagattgacacgagacgacttcctgggccaggtggacgtgcctcttagtcaccttccgacagaagatccaaccatggagagaccctatacatttaaggattttctcctgcgacctagaagtcataaatctcgagtcaaggggtttttgaggttgaaaatggcctacatgccgaaaaacggaggtcaggatgaagaaaacagcgagcagagggatgacatggagcatggatgggaagtggttgactccaacgactcagcttcccagcaccaggaggagctcccccctcctcccctgccgccaggatgggaagagaaagtggacaatttaggccgaacttactatgtcaaccacaacaacaggagtactcagtggcaccgacccagcttgatggatgtgtcctcggaatcagacaataacatcaggcagatcaaccaggaggctgcacaccgacgcttccgctctcggaggcacattagtgaagatttggagcctgaggcctctgaaggcggtggagaaggccctgagccttgggagaccatttcagaggaaatgaacatggcaggagattctctcagcctggctctgcccccaccgcctgcctccccagtgtcccggaccagcccccaggagctgtcggaagaagtgagccgaaggttgcagatcactccggactccaacggggaacagttcagttctctgattcagagagagccctcgtcaaggcttcggtcctgcagtgttaccgacacggttgctgagcaagctcaccttccaccgccatcagtggcctatgtacataccacgccgggcctgccttcaggctgggaagaaagaaaggatgcaaagggacgcacatactatgtcaatcataacaatcgaaccacaacttggactcggccaatcatgcagcttgcagaagacggtgcctccggatcagccacaaacagtaacaaccacctagtcgaaccccagatccgccggccccgtagcctcagctcgccaacagtaactttatctgccccactggagggtgccaaggattcacccatccgccgtgccgtgaaagataccctttccaatccacagtcccctcagccatcaccttacaactcccccaaaccacaacacaaagtcacacagagcttcctgccaccaggctgggagatgaggatagcccccaacggccgacccttcttcattgaccataacacaaagactacaacctgggaagatccacggttgaaatttccagtacacatgcggtcaaaagcatctttaaaccccaatgacctgggccctcttcctcctggctgggaagagaggatccacttggatggccgcacgttttacattgaccataatagtaaaattacccagtgggaagatccaagactacagaacccagccatcactggtccggctgttccgtactccagagagtttaagcagaaatacgactactttaggaagaaattaaagaagcctgctgatattccaaacaggtttgaaatgaaacttcacagaaacaacatatttgaagagtcctatcggaggatcatgtctgtaaagagacctgacgtcctaaaggctaggctgtggattgagtttgaatcagagaaaggcctggactatgggggcgtggccagagaatggttcttcttactgtccaaagagatgtttaacccctactatggcctcttcgagtactctgccacggacaactacacacttcagatcaatcccaactcaggcctctgtaatgaagaccatttgtcctatttcaccttcattggaagagttgctggcctagcggtgtttcatgggaaactcttagatggattcttcattcgaccattctacaagatgatgctggggaagcagataacgctgaacgacatggagtccgtggacagcgagtactacaactctttgaagtggatcttagaaaacgaccccacggaacttgacctcatgttctgcatagacgaagagaactttgggcagacataccaagtggatctgaagcccaacgggtcagaaataatggtaaccaatgagaacaaacgagaatacattgagtacgtatgcaccttagtcatccagtggagatttgtgaacagggtccagaagcaaatgaatgccttcttggagggatttacagaacttcttccaatcgacttgattaaaatttttgatgaaaatgagctggagttgctgatgtgcggccttggtgatgtcgacgtgaacgactggagacagcactctatttacaagaacggctactgccccaaccaccctgtcatccagtggttctggaaggccgtgctcctgatggatgctgagaagcgcatccggttactacagtttgtcacaggcacctccagagtacccatgaatggatttgccgaactctatggttccaatggtcctcagctgtttacaatagagcaatggggcagtcccgaaaaactacccagagctcatacatgctttaatcgccttgatttacctccatatgaaacctttgaagatttacgggagaaacttctcatggctgtggaaaacgctcaaggcttcgaaggtgtggattaaggaaggctccagcgtccggggcactgcccttccagcaagttccaagcgcacttttgcatttgccgagcagacttttgcagagccggtggcagaagcagtggcctggcccggctctggagcccagcttgtctgggccctgcccaagttccgccagggaacccagccccagctcaagtgccgccccctcaccgccaattctcaactggttgccgtgtacactgattacatttcaggaggacgtgttctatttatgttgtgcctctgcaggcaaagcccttaataaatattttgcatactttctaatgacaatgaatggaattaatcacgctacaggtatagtattacaactcatgtttactttttaaaatgatttagactgattttcagcttttatttcattacaattaaagatgtctcatgtacttggaaaagtgagcatattttttttttgtatttgaatttcatatcaagcttaatgtcagtgacatttttttatttttgaagtactttgacactcccagcctctactttattagaattggaagacgaatttttcttcaaaagccttctacagacaaatacttttgaaagaacttcaaatataacattaagcataatattttttccaaactcagaatgaaaataaactggatattactttttttttttttgtacaaatttagatactaagtccaggctggaagaattgtaacatagcatgatatctttgtgttaacttgaaaggactgaccccattgtcccttagaagtactgacgtgtgccatcacgcatttaagacaggattggactgtcatctcgcatcagaaaccgttacaatttcctgttgctgtacagcctcttctgaactctcttctctctttggtgttcatagagacatttccaatggcattgcttgattcaaaaccaaggaaaccagaaccattgatcttctatctctgtgattgctaagcagtagccaaataaccttcctttgctgtatctgcgtcccttctgaaggcactttatggaggtcacatctggttttgtttccattttttttttttttttcacgaatatcactcgtggcgattgctcctgcctccctgcacaagtctatccggtgcggtatctatcaggtgtgaacttggctgctagcgtatgaacccagatgtgacgcagagcctctgcagcgatcttctccaactgttctgtaatctctactcaacaataaggttttagttactgtatacactta

SEQ ID NO: 347 - protein, 831 aa, Mus musculus
MERPYTFKDFLLRPRSHKSRVKGFLRLKMAYMPKNGGQDEENSEQRDDMEHGWEVVDSNDSASQHQEELPPPPLPPGWEEKVDNLGRTYYVNHNNRSTQWHRPSLMDVSSESDNNIRQINQEAAHRRFRSRRHEDLEPEASEGGGEGPEPWETISEEMNMAGDSLSLALPPPPDVSRTSPQELSEEVSRRLQITPDSNGEQFSSLIQREPSSRLRSCSVTDTVAEQAHLPPPSVAYVHTTPGLPSGWEERKDAKGRTYYVNHNNRTTTWWIMQLAEDGASGSATNSNNHLVEPQIRRPRSLSSPTVTLSAPLEGAKDSPIRRAVKDTLSNPQSPQPSPYNSPKPQHKVTQSFLPPGWEMRIAPNGRPFFIDHNTKTTTWEDPRLKFPVHMRSKASLNPNDLGPLPPGWEERIHLDGRTFYIDHNSKITQWEDPRLQNPAITGPAVPYSREFKQKYDYFRKKLKKPADIPNRFEMKLHRNNIFEESYRRIMSVKRPDVLKARLWIEFESEKGLDYGGVAREWFFLLSKEMFNPYYGLFEYSATDNYTLQINPNSGLCNEDHLSYFTFIGRVAGLAVFHGKLLDGFFIRPFYKMMLGKQITLNDMESVDSEYYNSLKWINDPTELDLMFCIDEENFGQTYQVDLKPNGSEIMVTNENKREYIEYVCTLVIQWRFVNRVQKQMNAFLEGFTELLPIDLIKIFDENELELLMCGLGDVDVNDWRQHSIYKNGYCPNHPVIQWFWKAVLLMDAEKRIRLLQFVTGTSRVPMNGFAELYGSNGPQLFTIEQWGSPEKLPRAHTCFNRLDLPPYETFEDLREKLLMAVENAQGFEGVD

SEQ ID NO: 348 - DNA, 2899 bp, Mus musculus
gtttggctgcagggcagcattacagagcttgagttgttccctaggtctctggaatccaccaagttccgcctatagtgtttggccaggctgcctctgggatgagctgtttctgtcttccccacgtttgaattcgctcacgctttgagacaggcaggcatcagcaacagcagtttttagcccagacagctctcagcaccgtcagctcagcacagcttcagagggctctgcctggtgggaagctctgcagggctctacctgggcagtagctacagagccctcccctctcagcaccttgctccgcccactcgttccaggctgtcgattgccggtagggaaactggagagaccaggattcctcttccattcttgctgttgttaaggaaaacagaccaaccatctgcatctagaccagccttcctctccctcgctcccttttagaggaggttttcctgcctggaatctgcgacccatacgtgaagctgtccttgtatgtagctgatgagaatagagaacttgctctggttcaaaccaagacaattaaaaaggtaggctgatattccaaacaggtttgaaatgaaacttcacagaaacaacatatttgaagagtcctatcggaggatcatgtctgtaaagagacctgacgtcctaaaggctaggctgtggattgagtttgaatcagagaaaggcctggactatgggggcgtggccagagaatggttcttcttactgtccaaagagatgtttaacccctactatggcctcttcgagtactctgccacggacaactacacacttcagatcaatcccaactcaggcctctgtaatgaagaccatttgtcctatttcaccttcattggaagagttgctggcctagcggtgtttcatgggaaactcttagatggattcttcattcgaccattctacaagatgatgctggggaagcagataacgctgaacgacatggagtccgtggacagcgagtactacaactctttgaagtggatcttagaaaacgaccccacggaacttgacctcatgttctgcatagacgaagagaactttgggcagacataccaagtggatctgaagcccaacgggtcagaaataatggtaaccaatgagaacaaacgagaatacattgacttagtcatccagtggagatttgtgaacagggtccagaagcaaatgaatgccttcttggagggatttacagaacttcttccaatcgacttgattaaaatttttgatgaaaatgagctggagttgctgatgtgcggccttggtgatgtcgacgtgaacgactggagacagcactctatttacaagaacggctactgccccaaccaccctgtcatccagtggttctggaaggccgtgctcctgatggatgctgagaagcgcatccggttactacagtttgtcacaggcacctccagagtacccatgaatggatttgccgaactctatggttccaatggtcctcagctgtttacaatagagcaatggggcagtcccgaaaaactacccagagctcatacatgctttaatcgccttgatttacctccatatgaaacctttgaagatttacgggagaaacttctcatggctgtggaaaacgctcaaggcttcgaaggtgtggattaaggaaggctccagcgtccggggcactgcccttccagcaagttccaagcgcacttttgcatttgccgagcagacttttgcagagccggtggcagaagcagtggcctggcccggctctggagcccagcttgtctgggccctgcccaagttccgccagggaacccagccccagctcaagtgccgccccctcaccgccaattctcaactggttgccgtgtacactgattacatttcaggaggacgtgttctatttatgttgtgcctctgcaggcaaagcccttaataaatattttgcatactttctaatgacaatgaatggaattaatcacgctacaggtatagtattacaactcatgtttactttttaaaatgatttagactgattttcagcttttatttcattacaattaaagatgtctcatgtacttggaaaagtgagcatattttttttttgtatttgaatttcatatcaagcttaatgtcagtgacatttttttatttttgaagtactttgacactcccagcctctactttattagaattggaagacgaatttttcttcaaaagccttctacagacaaatacttttgaaagaacttcaaatataacattaagcataatattttttccaaactcagaatgaaaataaactggatattactttttttttttttgtacaaatttagatactaagtccaggctggaagaattgtaacatagcatgatatctttgtgttaacttgaaaggactgaccccattgtcccttagaagtactgacgtgtgccatcacgcatttaagacaggattggactgtcatctcgcatcagaaaccgttacaatttcctgttgctgtacagcctcttctgaactctcttctctctttggtgttcatagagacatttccaatggcattgcttgattcaaaaccaaggaaaccagaaccattgatcttctatctctgtgattgctaagcagtagccaaataaccttcctttgctgtatctgcgtcccttctgaaggcactttatggaggtcacatctggttttgtttccattttttttttttttttcacgaatatcactcgtggcgattgctcctgcctccctgcacaagtctatccggtgcggtatctatcaggtgtgaacttggctgctagcgtatgaacccagatgtgacgcagagcctctgcagcgatcttctccaactgttctgtaatctctactcaacaataaggttttagttactgtatacactta

SEQ ID NO: 349 - protein, 354 aa, Mus musculus
MKLHRNNIFEESYRRIMSVKRPDVLKARLWIEFESEKGLDYGGVAREWFFLLSKEMFNPYYGLFEYSATDNYTLQINPNSGLCNEDHLSYFTFIGRVAGLAVFHGKLLDGFFIRPFYKMMLGKQITLNDMESVDSEYYNSLKWINDPTELDLMFCIDEENFGQTYQVDLKPNGSEIMVTNENKREYIDLVIQWRFVNRVQKQMNAFLEGFTELLPIDLIKIFDENELELLMCGLGDVDVNDWRQHSIYKNGYCPNHPVIQWFWKAVLLMDAEKRIRLLQFVTGTSRVPMNGFAELYGSNGPQLFTIEQWGSPEKLPRAHTCFNRLDLPPYETFEDLREKLLMAVENAQGFEGVD

SEQ ID NO: 350 - DNA, 375895 bp, Homo sapiens
  misc_feature (1)...(375895): n = A,T,C or G
tcagactactaaagacattgttattttaaaaataaataatcactaaacttgtcaacattgtttattaaagccgatgttttagaatgcctaccctagagttgaaggacatcatttattttgctttttggaaaataaaaatgcaaagaaagtagaaaaaaacccaaatcatttcccttatcttgcaaaaattgaactcaaataattgagcatttctgtggcatctagaaaagtatagactaaaatttgccatcacacttcttgtaattggttgaataatggcctccaaagatatccaggtcttcatccttggaacctgtgaatgttattatgtggcaaaagagagtttgtatatgtaattaaagatcttgaggtgagagggtatcctagattatgtgggtggattccaaatataatcacgtgtccttattagagggaggcagaaagagatttgactgtagacagaagaaagaaggtggtatcatgacctcagcagagagagggctctgaagatggtaccagctttaaggtgcagggaggggctgttagccagggaatacaaggaatccagctctagaaggcaaggacactgattctccccttcagagagggccttgtaccttggcctggtgacattaattttgaccttctgggctccggatgtgcaaaagaaaaaaattctgctcttttatgccaccaaatgtgtggtaatatgttataggggccagccatatgaaccaattaatgcttttcccaatttctaggaaacaggaacttgatgtttgattttaaagttcagtacatgtgttaatggggatgaagtagaatgtaaaggtatgataaaaataataataagaagaacaaaaaaaacaaattttaggccaggcactgtggctaatacctgtaatcccagcactttgggaggccgaggcgggtggatcacttgacgtcaggagttggaggccagcctggccaacatggtcaaaacccatctctactaaaaatacaacaattagccaggcatggtggtgcatgcctgtagtctcagctacttgggaggctgaggcgggagaatcgcttgaatccaggaggcagaggttgcagtgagccaagatcatgccactgcactccagccggggtgacagagtgagactctgtctaaaaaaaaaacaatcaaccaacaaacaaaaaacaaatttggctgtgcttcttttaggaaaaaagacttaattgcattaaatctcaaatgcatcattagtaaagagcggtaactgagtttcctcggctggcattgtggtggtctagctatactgaagggtctccctgttataagtcaacctaattttttaaatgtgttgctaggcttgcagttcataagggaattcatcctttaaggtcccatatattagtcagctttggctgtgataatgatgtacagcaaaaatctcaaaatctcaatgtctacaacagtaagcatttatttctaatttgcattgcatgttggcagctgttaagctggataaccctgctccaggctccaggtcaggttcaggtctgtttcatggttcttctcattgatacttaaggagcaaagctcatctaggatgtgatgttctcatggtggagggcaggagcacaaaagaggtcccagaatcttgcaaacctcttatgatgtctgttttgaagtggccacactgccatttctgctaagatttcattggccaaagtaggtgcaataacactgggacagggacatttactgggggtgaggaagtaaatatttgccaaatactaatatggtctatcatactcctctattagctaaaaccaaacaatgatgcagtaagcagcaagtaaatgctattaatatatcaatattgcagttgaagggagactaaccctttggctggtggctgaacctgagacttctgcactaaattgagactctcaaatggggctaaagtggccctagagtggtagggtcccctgcttcttagtagaaagaaacacaaatccattttggattcccatagactaagactaaccaaataaaatcgcaaccaaatgaatttccaatcaacacacatggaatgaagttactatgagtaagagtcagcagaaacaatggaagacacaccccaagctttagatatgagaattaacaaaatagaaaatagttatgaaatgtttaatgaaataaaatttggagacataaaataagaaactcaagaattgagaggctgatttgaaaaagaattaaataaaacttttatttacttataattcattaattaaattttttgagacactcaggctagagggtagtggtgtgatcatagctcagacaacctcaaactcccgggctcaaatgatcctcctgcctcagccttctgagtagctgggactataggcatgcaccaccacacctggctaaaaacctttagatacaattactgagtctaattgttgtattaaaaaaactcaactgatgggccaaacagaagattagactaaactaaatatttatttagcaaagtagatgagaggtttgaagaaatcacccagagtgtagcagacagggaaacagaatacgaaaaaggttaagagatacagagaatagaatgagaatgtctaacatataattaattggagccctagaagaacagaatatagacaatggagaaaacagaatatatgaatagattagtagctgagcattttccagaaataagatttaaatcggagatagaaaaaacgcaaagtacattaggcaggatggagaaaaggaaagccacatgtagacaaattacagaaagtttagaacactgaaaacaaaaagcagctaaagataaggcaaatgacttaaaagggacaataattagactaagagcttactgttcatcatcatcaatggaagccagaaatcagagagataacatcttcagagtgctgagaatgaaacaacattatacctgggataagactacccttttatttttttctgaagggttgttctgtccccaagaaccctcccaaaataaactgattataaacctgagacttcagagtaatagggattgggtaaaaccaatcaaggacactaatcacattaagaacatctatttacatccagccatgttccacaacagctttgagtctatttctagtatataatttcaccctctctcatggatgtggatagacattttcgggtaaacaaaaactgcaagtttattacccatggacctttactaaaggaatttaaaaggatgtttctaggaagaaggaaaatgatcccaaaggaacatctaagaagcaacaaggaatccttagaaaagaaactgcaaaacatattggtaatgctagaagaacttgtataatataataataatatctaatttggtggtttcaaaaaaaagacaggagccaggcatggtggctcacacctgtaatcccaaaattttgggaggctgaggcaggaggatcgcttgaagccaggagtttgagaccagcctggacaacatagcaagaccttgtctctacaaaatttttcttaaaaataaagaaaaaactaaaaaaaaaaaaaaaagccagagcaagactggtccttgatcaaaatagttttttaagcttcatgttcagataggggattaagatacgaacttttggtttgttacattaggcattgttaaaaaaaaaaatttcaggcatattaaatttaacagattttaattgagcaaagaacagtttgagaatccagcaacattgcgcttccctgcaatgagaataggttcagagaccctgatgctgctgtgtggccaaagacggtttatggacagaaaatgggaagtgacttacagaaaacagaagttaggtacagaaatagctgaattggttactgctcagtgtttgccttatttgaacacaatttgaagagttggcctctttggccgaaagtcagtgattgatacaagagtaagttacagtctgtttacacatctagttaggttatagctcattatgtatgaagaaacctttaggctgttaaacttaatttaacagcatgcatgtaaaatgtcaagtgtaaccggtaaaagaacagaaatgcagtgattaacatcccaacccatcccaagtgaggaaataaatgcagtaagaaaacaaagaacactatcattactcaatcagacgactaattaaaaggcacgaaaaagtacgtagtaaaaatgtgaaaacaaagccaggtattttagaaatgatgatttttaaaaggtaaattgctattagtaataaactaataaactatattttattaattttagagctctagaataaatagcacatagttattcaaaaatgtatttctttaaaagcttagctattgatatgatttggatgtctgttccctccaaatctcttgttgaaatgtgatttgcaatgttggaagtggggcctggtggaaggtgactggatcatgacggcaggtccctcatgaatggcttagcaccatcaccttggtgataagtgagttctagctcagttagttcatgtgagatctggttgtttaaaagtgtgtggcacctcccaacccactcttgctcttgctctcaccatgtgaagtgatggctgcccatcgccttccaccaatgattgtgagcttcctgaggcctccccagaagcaaatgccagcaccatgcttcctgtacagcccacagaaccaccgtgagcccattaaacctcttttctttataaattacccagcctcaggtgtttcttttctttctttcctttctttcttcctttctttctctttctttcttttttcagggtctggctcttttgcccagactggagtgcagtggtgtgatctcggcacacctcagcctcaacctcccaggctcaagggatcctcctcagctccttgagtagctgagactacaggctcaagccaccaggcccagcgaattcttgtattttttgtttttagagatgaggtctcactttgttgcccagctggtctcgaactcctggactcaagggatctgtccacttcagcctcccaaagtgttgggattacaggtgtgagccactgtgcttggcctcaggcatttcttcattaatagcattgcaagaatggcctaatgtagctatttttatacaaaaagatgagctatttacaagtcattctttgctacccacctctatatttgtcaaaaatttgaagcataatatagctttcttatatgatcataaatggcttaaatttgttacatttctgtgtgtcaaggaatggtgctgagttccaagatgataccagtttttacaggtttgtggccatcttcgaaatgtctgcttaataggccttctttttaaagaagacaaatcatcactgaaaattgaagagaaaaatcgagtgttatttatatgaaacttaaacatgtgacattatgtattcttcttctttgggtacttcccagatgtgattatgatctacatagttttgctaagacaactcaataatttgtaaagaggcttagcattaaaatgttccctatttgtgattacccattgtactttaaaattgttcctgctaatttttcatttctgatgatccaagtgaagagtatttgccaaacacccacagtatcaaatctaagatgctaaaggcagcctgcaaagggaacaaagggaaacgaattctagaggagactctacaagttaaggttctatgtaattgttgggtagacgcaaaacggactggaggaaacattgcttttgatacacctgctgaatagttccctttaagggttgtcctccctcacccccaaagaaaatggattactaggctgggctaggtggctcatgtctgtaatcccagcactttgggaggctgaggcaggtggatcacgaggtcaggagatcgagaccatcctgactaacaaggtgaaaccccgtctctactaaaaatacaaaaaattagctgggcgtggtggcgggcgcctgtagtcccagctgcttgggaggctgaggcaggagaatgccgtgaacccaggaggcggagcttgcagtgagccgagatcaagccactgcactccagcctgggcagcagagcgagactccatctcaaaaaaaaaaaaaaaagaaagaaagaaaagaaattggattactaatctgagacttcagagtagatgatgggtaaactgattgatgatgctagtcttctaagtatgtttgtttatattctacctcactccacaaaagatttgagtgtgtttataacgtgcaatttcctctaagttgaaaaaaaaagaatgaaaaaacagagtggtggaaaatatataaagaaaaggcatataggctgggctcagtagctcatgcctgtaatcctaacactttgggaggccaaggtgggaggatcacttgaagcctagaattcgagaccagcctgggcaagggagaccccatctctacaaaaaataaaaaaccttagccggtacagtggtgtgctcctgtagtcccagctacttgggaggctgaggtgggaggatcacttgagtcctggagtttgagggtacagtgtgctgtgatcatgccactgttctccagtctggacaacagagcaagaacttgtctctcggggaaaaaggaaaagaaaaagaaaaaaaaaaaagaatagtaatataaatctaggccagatgtctctaaacttggcagtggtgcattaggatcacctggggaacttttaaagctcctgatgcccatgtggcaccctgtactaattaaatcataatgcctgggagtgggaggcagagaggagcagtagtaaaaattcccaaatgtttctatgtatagcaaaatttggaaactaagctgatgttctcagccttaagtgcacattagcatcacctgggaggctgttgaaactactgatgtcagaatccattaaatcatagcctctgatgctggttaccgggcacttagtctatttgaaagctccccaggtgattgcaatgtacatgctgagtagagaaccacagcattgggggaaagttggtatatagttacaaaagggattttttttttaatgggttcttttatggcttaagaccatgaaactggttctgagcttcctggtggccaaagtagatagaaaaacacagtcggttttaataattttggtcatctgccatgcaaaagcttaccagtttcttgaaagcaaaagagcttttcttcatagatctgaaataaatgtctagtttattagtcttctcacagaggatgttgatgtcatggatcacgattttataaacaccccacaataagtgacatatggcaagtttcatattatagttcctaataaccatccctcagggaaagacaaggacatgaccctgagtgcagggctataggctgttgcggtgggtgtgtgggagtagatgataaaagacaggaagagaaactgccacacccctctacagtttccagataacatagccttacccaaaggcgaagcctggaattatgtacctccaggatgtggaaggcgtgtcctgtgtaattagaaattataattttctatcagcacattttaagaattatttatttatgtatttatttatttagagacacagggtctttctctgtcatccaggctggagtgcaatggcacgatcatagctcactgtaaccttgaacttctgggctcaagtgaacctctagtctcagcctcctgagtagctaggactatgggcccatgccaccacacctggcaaatttttaatttttttttttttttgtagggacaggggtctctctatattgcccaggctggtctcgaactcctggcctcaaatgatcctcctgcctctgcctcccaaaatgctagcattattattcaattacttttcttcctttataatataaactgtacaaattttacaaaggtttggctagtgagggtaggtagagaagcactgactcccatccatgagggtcacaggctagggcaagggcatctgagaatgcgtgtgtgtgtgtgtgtgagagagagagagagagaaagacagagtgtgcacgtgtaccttttgtttatcaaaagactttagggttgtttttttttgtttttgttttttttgagacggagtctcgctctgtggtccaggctggagtgcagtggcgcagtctcggctcactgcaacctccgcctcccaggttcaagggatcctcatgcctcagcctccccgagtagctgggattacaggcgcccgccaccacgcctgggtaatttttgtatttttagtagagatggagtttcaccacattggccaggctggtcttgaactaccgatcttatgatccgcccgcctcagcctcccaaagtgctgggattacaggtttgagccaccgtgcccggtctaaagactcgaggtttgaaagggttgaaaaacctcagtattgaaagaatggacagaaatctgacttttaaatagtcctccataaatagttctcattgggggttttgtggcctgtaagtactgtggacttgacggctcaagacttctagagaaggcttctgagtaggatgttgactccatggggctaagtcgtcaaaggaaacccattctacggcacaggttttaagccagtcatgctgcaggaaggcaaaggagagcttaaggtagcatgggtgggctcttttgaaaacgaactagcagggcgaacagcagatatttagttatgtagctggcaacgaggaatatgattccttcgggtcacgcgagttctctctgaacttccttgaatgaaaatcctaaatgcatcctggtaatacccaagtaggcactttgacgtttccttttcaaaggcaaatggaatgttctgccgtctgttttctttttgaactcccaactgcacttaacatctaaatttaaggaaaggcttccgaaaaagtcgactgacgaatttctttcacttatttaaagtagtctcttgcagtcctataaatcggaaggattaaatgaactgcttgctagagaaacggtagctgggtggtgggaagaatcctacggtggctaataagacgtctcgatcatttgcatatgcaaaggataaccttaagcttgagtttgatatttcacgttgcggctcacaaatgaactgctttttattcaaagaaccatgctgtctgttttcgcgtgggtgggtgtgtaaccggggcgggcgctatgttggttttgttccctgcaaggttgacacaggcaatggcgacttgcggccacactggggcagcctctcctcggctggcagccgggccgggcggctcgctcccgggagctgacaatgtagccaagtcctgctcgtcggggccgcaaagaatttaaaggggtctagaaacatccatcttttccccttttcacagttaacagcgagctcagggctctcggtaaaaagaccaccgggaggaagaaacgctcagggcgtttttgttattgttcgcaaaatcctctatcgcccccaaacgtccagcccgccccctccctaaagcggaggggaaaccgggagaggagggagggtcgnnnnnnnnnnnnnnnnnnnnnnnnnnnnnnnnnnnnnnnnnnnnnnnnnnnnnnnnnnnnnnnnnnnnnnnnnnnnnnnnnnnnnnnnnnnnnnnnnnnnnnnnnnnnnnnnnnnnnnnnnnnnnnnnnnnnnnnnnnnnnnnnnnnnnnnnnnnnnnnnnnnnnnnnnnnnnnnnnnnnnnnnnnnnnnnnnnnnnnnnnnnnnnnnnnnnnnnnnnnnnnnnnnnnnnnnnnnnnnnnnnnnnnnnnnnnnnnnnnnnnnnnnnnnnnnnnnnnnnnnnnnnnnnnnnnnnnnnnnnnnnnnnnnnnnnnnnnnnnnnnnnnnnnnnnnnnnnnnnnnnnnnnnnnnnnnnnnnnnnnnnnnnnnnnnnnnnnnggcgggagggaggcgcgggtcgcggggagggaaagcccggccgggtctgcgccgccgccgcgcgcagggagaggcgccggggctgccgcccggtgctcggcgcgctctcgggagccgcccgcccgctggtcccgcagccttccgggaggaagcggtgccggcagcgtccagggcgcgctctcgggcaccctcacctgccggcgcccggccgcttacccggcagggcgtgcgcagggtagggtgcgggaccggggggacctggaggcagaggggagaaccggccgtccgcgccgcagcacagccgctgggagcgcctcagaccccgcgcggggcgccggctccatggcgaccgggctcggggagccggtctatggactttccgaagacgaggtgagtggcacccccttcctgctcgggactccccggggagttcctatcccgcgccggcagggggaggggaaaggggccgtccccggggtgctcgtgcccagcgtctgcaggggagccccaaagcgggagcgccccggagcgggatccaggggagcttgggtccttccgcaccccccaccctccgcaagccgagctcattgtttgtaaataaagcggcgcgacgcccttggagctgggggttcactccgcagctcctcgcttttgggaggagagggagggggcatgcgtgcctctcttccctcttcctctccaagcagcgtctcccggggctgttgggcaactttccgcctctcgcccctgcagcccgggagtccatgatgcatgtcacgtctgggtcgcgcggctggagacccgggactgcggagaagccggatcgtttccccctggaactttctctctcatgattgtgtggatcagcaggcgctcagaagcctgtgcgtgcttatcccggcgggaatgggggacacgctgcgtgtgtccctcccctcgttttgcaaagtctacggccaggattgtggatttcggagcctcggtgggggaggtgttcaaggctggtggcaggtgctcctggaaacttggggaggaagcttgcagccctgccattttttcctcccgaggattcaaagcccggcacctccggggtgggtggggagaggaaagcttaattgatctcttttattaataaagcgactgaataagtcacgcctcccaggcggtcggtttcactggaaagggctttgtttttaccttcactctctcttccgtgtctcccactccccccttttgaaacaatcctgctaaatcactgcctagtcctctctcgaccagccacgctcggctcttattggtatgttgctctgccaaaaaggggggtgggacgcttgtcgcgggcgcggcgtgacaggcaggctggatggagcaggtaggagtggtttgccatctggcggggtgcgcgctcaggtctggctcccctttcgagaggtgaattttacaacccaagaagcattactcagcagggaggtatttcctatcctggttgtgcatttcatgaaaagttgatgcctggaaattcaggcgttctcgatttctctttcttcccctccctcctttcttttcagaggttccctctttctctcgtgttgggggtggggttggaagaaaggctattatctgagacaggctcgcgttatggctccgctttctgcggctctcctaccctggcatggtgtgtgtgtgtgcctgtgtgctacgtaagtgtggaatgaaaggtattttggggtgggaagggtgtttagggtatgaatttttttcttagcggtgctaggcaaagcttgatgtatttatttgatcaaagaatgatcacagtgcaaataatgtgtgatttgtgtgtttattttgcctcgctgtgcttttgtaaaataatttcccgttttgtgtaactacctggggataggtgacagtagcattgtttcattgacccggggggcttctcctctccctcctggcttctctctttgaggagctttcccttgcatcctctacttctccatttaattagtggcagtagagggcaggccctgagttgcagagacgcagacattcctaaacaaaggggctgcttgggttgacgtattgtggggggtggggggtgaggacagctgcatttcatcctaggttcttttaaaaaatgttttaataacatgattatttgtaaaaactcccccgaaaaaacgattttaagagtgttttgggaagtgcagctggataaatgaaacacgttaatgtcactgttgtttgtgctttatttacattggcagtgagtgtcagaatctacctagagcacatcttgccacttttgtccacaggagtcactactaatcatcataactgatgtctagtgtgaaagtgaagcttggaatgtaaacagaggccgagtgtgtgttggcatgtgactggattcactcctgcatgttgctagaagggaatttggggctgtataggaaatagcaagaggtgatgaagacaccttttattatctatttattgccatgtcgctggtagtatttagttccacacacattgtatttcacaagatgagtctcatccgtcttcctttttcaactttctcctaccagtgaaaaaataagccagggcagttctgatgacttcacatttcattggtatttgtttttcatgggctgtcacgttgcccttcagagaatcagggaatgccttcgtagaatattaacgacaaattgttgaatttgcacagcttgttttgtctccctgaattagtatgtgtaagaaaaaccaatggaagattttagcaggctctgaaagtagaatgcccgctgaagcaaacggcagggttgttcttccaaggcgtattaaatatgggtacacttagtttgcagacttggtgtgctgcagaatatcacatatgaagatattttgaccgctatttagaagagtgacctcataaatcttttagcaaagtagacacacatacctaccacatttcttaaaagtagattcgtattttgatttgagattgttgaaaagcatggtatgtttggagtgcacttagttatgtcccatctcataaagactgtcgagctctctgcactgctgatgatgaagcattgcatgaacccagaaaacggggatgccaaagcacagggcttaggtgctgttccttgcgtcatcagcagaggtctgtccactttgtagaaggtaaggggttgagatgtgggctttgcttgtgtgaatgtatgtgctgtttaattttttctgtgtgtttcgggcggaggtttctctggtgagttataattcatatttaccctgatttaagtcatgtcactttaggtagccagattcaaaaccatcagatgaaggacttttggtgttagagggattagcagtttaacaaaacttctgattcatggcccaagatcagatttggtttggaatcagaacactttggactagtttctgcatctggcttgagtccttgtggatttcttgttttatttctttatttttggcaatctgtagtgcattttggcatagtttacttatgaatgttaccgctaactttctgaaatcttttattccattttagaaaggtatcatttattgaaaagatttttctactgaacaaaatactgggattgaatggcagcttcttatcacattagatatgacattaagtaatttcgttagtagttaaaatgaagcaaatggcatagaaatgaaggccaggctgacataggataaatggcaccttctctccttatcctgtacaaacacggatagttggctacttttgaatgcctcttctataccaatggtaaaaatccggcttaattggggccacattctagcctagtcacaatcagtggcttgcattatgtcctttgagatgtggcagatctgcttataggtgccagtcaccacggctccctgctggcttgggggtctttctactcatttacatataattatctacttcttaatcaaccattaaggttaacttttggcatggatcctgtatgcttttcagtttaagatgctgtcacttttaagatgcgccatgagagcaaagtgctaagccttgtgcacatactatgtcatttagttctcatgagaactgtgtgaggtaggctgtgatttacagatgaggaatgaaagctcaaagaggttacgtgacctgcataaggacacaaaacaagttaagttatggagccagctattttgaatagaaaggcctagtttttaacatgctgaatatcctccccttctgacaaatgccttgaaaggtcttactatctagattatttaagataatgtaagagaaataaacaccactggttgcaaactgatggctgctgggcccgatttgaccaggaaccctgcttaatgtggtctctagagtgttttaaagcttggaaatttcatgaaaatggtaaaaatctggcttaattggggccacattctaacctagttacagtcagtggctggcattatgtcctttgagatgtggcagctagttgtgctatggttgcagtcaccactactttctgttgtcttaggggtctttctacttgtttacatataattatccacttcataacaaacctttaaggctaacctttggcgtggatgccatatttctttcactttagtgtgctgtcacttttaagatatgccattatttcatgtaccacgaagaaaaaattgctgtcaagttatgacatactgtccatcttatgaagcatccttatttcagagaagttgaaatatgagaaaaaggatattttagaattgatgaattacagtgactagaaacctgggaaaactccatgccatcagtttcaatatccccaatcattcagtacttttaagtcaacgagtagtcagatttctgcttttctgtgtttgaggaaagtgctagaaaaagagaagtgctcttaaataggcattagcacagaaggaactgggggcctagatcatagccaactggatggccgtctgtaagtgattaagaatagttgttagtttttaaaaagtggcctgtgtgtattttcaagagattacttgggaaaccctatgtgccatctttgcagctgtgcaaaacggtgaggacaagattgctttcaaaaattgtggtttagattttgcttggatctcaaggtgaatgctgacaggccgttttctgaagagagagaaggcttgcccagtcatgccaagtccaagtgcctgtgtcgggcctagatgctggatggtagactgtatacccaggacatataggtaatgtttgagaaacaaatgttaaaaggacctagttttcatggtgacatttaaaatcagtttttaaaattcatgaatataacatgttgttttaaaatttgattatagggaccgggtgcagtgatcactcctgtaatcctagcattttgggaggccgaggcaggagaatcacttgagttcaggagtttgaggccaggctgggcaacgtggtgaaaccccgtctctacaaaaaatagaaaagttagccaaacatggcggcacgtgcctgtagtcccagctacttgggaggctgaggtggaaggatcacttaaacctggaggcagaggttgcagtgagccaagatcatgccactgcactctagcctgggcgacagagtgagaccctgtctccaaaaaaaaaaaaaaaaaaaagactaatgaatagaatttattttcttcaatgatgtagtgtctgtggaatttgtagacattgacatttgaattttcattatatttagttttattaaatcagaatgttatgattgtttatttcattattgaacatcagtttccttaatttaaggaataaaaataattttgctcaggccagacatagtggctcacatctgtaatcccagcacgttggaggccaaggctggtggatcacttgaggtcaggagtttgagaccagcccggccaacatggtgaaaccctgtctctacaaaataattaaataaataaatgaaaaaaaaatcagctgggtgtggtggtggacatctgtaatcccagctactctggaggctgaggcaggagaatagcttgaaccctgaaggcagagattgcagtgagccgagatcgcaccactgcactccagactgggtgacagagtgagactctgtcacaataataacgggctggggcagtggctcatacccgtaatcccagcactttgggaggccgaggctggaggatcacctgaggtcaggagtttgagaccagcctggccaacatggtgaaactccgtctttactaaaaatacaaaaattagctgggcttggtggcaggcaactgtaatcccagttactcgggaggctgaggcaggagaattgcttgaacctgggaggcagaggttgcagtgagacaagttcgggccattgtgctccagcctgggcaacaagagcaaaactaaaaataaaaaataaaaaaagaatagtaatagttttgcttaaagggtgaggacagtgacaaatggtgatcctcagatgactgtagtttctttaccattacagaatgcaattcaaatgaaaaccattgcatggtactcaggcatttcttcaatgcagtgtgtgcccacatcaccaggaagcttacttgggaaagtttgttttgggattctggagtacctcaatatatctggtatattttcccaagaaaagtgaataatccttggggggccgaggtggacagattgcttgagcccaggagtttgacaccagcctgggcaatgtggtgaaaccccacctctacaaaaaatacaaaaacttagctgcgtgttgtggcacgcacctgtggtcctggctgctggggaggctgaggtgggaggatggcttgagcctgggaggttgaggctgcagtgagccatgatcatgccactgcactccagcctgggtgacagagcaagatactgtctcagaaaagaaaggcaaacaaacaaagatcaccccaaagaagaactcccaacatattaaaagtcattgagttttgtacccttcaaatggatgaattgtgttgtgtatgaattacatctgaataaaactgtttaaaaatattaagaatgattgagtgtgacattattgcagcagtacattggagtttctgctaaattacttttgcattcatttcaaaaggaagcaactatgcccattgctaatttaataacctgtttgcttgtgcggtgtttaaaatggcatcatgaaaacatggcaatgtgtgatagattaagagccaattaaattttttattttgagttacaagatctgcattaaacagattttattgttgcccttgaatttccagtcttagatgagtagcagcagtgaaaaaaagagatcctaacttaagagttttcaagctttttgatgttgcaggtatttgaataagtgggtctgtcttactgaaatatttgttaattagcgataaagcaaactatatgttgatcttttggtagtccatgctaaggaggattagaataatatataaataatataatggtaataagtatcagggcaggaggattaaagaagggtggaagaagtgtgacaaaatgttactttctgtttttacattgtttctcttccaggtcacaactgtatttcaaatgtatttcattttcagactataggtggcaatgtttgtgctgttcactgtttaatgttactgttggctcgggtgttgcttgttgctggaatatggaaatgatagcataatttagagttgagaataaaaaaaactagatttagaaaactagaaactagatttagatttagtagagactttctaaatagtcctagttctgctgtgtggacccttctgtaactttctgttactctgagaaggagctgataattatcacaactactggtgtttgattagcagagacattcttgattcctgatgcaagaccgtggctgaagttgtagcagggcgtttggtggttggcggnnnnnnnnnnnnnnnnnnnnnnnnnnnnnnnnnnnnnnnnnnnnnnnnnnnnnnnnnnnnnnnnnnnnnnnnnnnnnnnnnnnnnnnnnnnnnnnnnnnnnnnnnnnnnnnnnnnnnnnnnnnnnnnnnnnnnnnnnnnnnnnnnnnnnnnnnnnnnnnnnnnnnnnnnnnnnnnnnnnnnnnnnnnnnnnnnnnnnnnnnnnnnnnnnnnnnnnnnnnnnnnnnnnnnnnnnnnnnnnnnnnnnnnnnnnnnnnnnnnnnnnnnnnnnnnnnnnnnnnnnnnnnnnnnnnnnnnnnnnnnnnnnnnnnnnnnnnnnnnnnnnnnnnnnnnnnnnnnnnnnnnnnnnnnnnnnnnnnnnnnnnnnnnnnnnnnnnnnnnnnnnnnnnnnnnnnnnnnnnnnnnnnnnnnnnnnnnnnnnnnnnnnnnnnnnnnnnnnnnnnnnnnnnnnnnnnnnnnnnnnnnnnnnnnnnnnnnnnnnnnnnnnnnnnnnnnnnnnnnnnnnnnnnnnnnnnnnnnnnnnnnnnnnnnnnnnnnnnnnnnnnnnnnnnnnnnnnnnnnnnnnnnnnnnnnnnnnnnnnnnnnnnnnnnnnnnnnnnnnnnnnnnnnnnnnnnnnnnnnnnnnnnnnnnnnnnnnnnnnnnnnnnnnnnnnnnnnnnnnnnnnnnnnnnnnnnnnnnnnnnnnnnnnnnnnnnnnnnnnnnnnnnnnnnnnnnnnnnnnnnnnnnnnnnnnnnnnnnnnnnnnnnnnnnnnnnnnnnnnnnnnnnnnnnnnnnnnnnnnnnnnnnnnnnnnnnnnnnnnnnnnnnnnnnnnnnnnnnnnnnnnnnnnnnnnnnnnnnnnnnnnnnnnnnnnnnnnnnnnnnnnnnnnnnnnnnnnnnnnnnnnnnnnnnnnnnnnnnnnnnnnnnnnnnnnnnnnnnnnnnnnnnnnnnnnnnnnnnnnnnnnnnnnnnnnnnnnnnnnnnnnnnnnnnnnnnnnnnnnnnnnnnnnnnnnnnnnnnnnnnnnnnnnnnnnnnnnnnnnnnnnnnnnnnnnnnnnnnnnnnnnnnnnnnnnnnnnnnnnnnnnnnnnnnnnnnnnnnnnnnnnnnnnnnnnnnnnnnnnnnnnnnnnnnnnnnnnnnnnnnnnnnnnnnnnnnnnnnnnnnnnnnnnnnnnnnnnnnnnnnnnnnnnnnnnnnnnnnnnnnnnnnnnnnnnnnnnnnnnnnnnnnnnnnnnnnnnnnnnnnnnnnnnnnnnnnnnnnnnnnnnnnnnnnnnnnnnnnnnnnnnnnnnnnnnnnnnnnnnnnnnnnnnnnnnnnnnnnnnnnnnnnnnnnnnnnnnnnnnnnnnnnnnnnnnnnnnnnnnnnnnnnnnnnnnnnnnnnnnnnnnnnnnnnnnnnnnnnnnnnnnnnnnnnnnnnnnnnnnnnnnnnnnnnnnnnnnnnnnnnnnnnnnnnnnnnnnnnnnnnnnnnnnnnnnnnnnnnnnnnnnnnnnnnnnnnnnnnnnnnnnnnnnnnnnnnnnnnnnnnnnnnnnnnnnnnnnnnnnnnnnnnnnnnnnnnnnnnnnnnnnnnnnnnnnnnnnnnnnnnnnnnnnnnnnnnnnnnnnnnnnnnnnnnnnnnnnnnnnnnnnnnnnnnnnnnnnnnnnnnnnnnnnnnnnnnnnnnnnnnnnnnnnnnnnnnnnnnnnnnnnnnnnnnnnnnnnnnnnnnnnnnnnnnnnnnnnnnnnnnnnnnnnnnnnnnnnnnnnnnnnnnnnnnnnnnnnnnnnnnnnnnnnnnnnnnnnnnnnnnnnnnnnnnnnnnnnnnnnnnnnnnnnnnnnnnnnnnnnnnnnnnnnnnnnnnnnnnnnnnnnnnnnnnnnnnnnnnnnnnnnnnnnnnnnnnnnnnnnnnnnnnnnnnnnnnnnnnnnnnnnnnnnnnnnnnnnnnnnnnnnnnnnnnnnnnnnnnnnnnnnnnnnnnnnnnnnnnnnnnnnnnnnnnnnnnnnnnnnnnnnnnnnnnnnnnnnnnnnnnnnnnnnnnnnnnnnnnnnnnnnnnnnnnnnnnnnnnnnnnnnnnnnnnnnnnnnnnnnnnnnnnnnnnnnnnnnnnnnnnnnnnnnnnnnnnnnnnnnnnnnnnnnnnnnnnnnnnnnnnnnnnnnnnnnnnnnnnnnnnnnnnnnnnnnnnnnnnnnnnnnnnnnnnnnnnnnnnnnnnnnnnnnnnnnnnnnnnnnnnnnnnnnnnnnnnnnnnnnnnnnnnnnnnnnnnnnnnnnnnnnnnnnnnnnnnnnnnnnnnnnnnnnnnnnnnnnnnnnnnnnnnnnnnnnnnnnnnnnnnnnnnnnnnnnnnnnnnnnnnnnnnnnnnnnnnnnnnnnnnnnnnnnnnnnnnnnnnnnnnnnnnnnnnnnnnnnnnnnnnnnnnnnnnnnnnnnnnnnnnnnnnnnnnnnnnnnnnnnnnnnnnnnnnnnnnnnnnnnnnnnnnnnnnnnnnnnnnnnnnnnnnnnnnnnnnnnnnnnnnnnnnnnnnnnnnnnnnnnnnnnnnnnnnnnnnnnnnnnnnnnnnnnnnnnnnnnnnnnnnnnnnnnnnnnnnnnnnnnnnnnnnnnnnnnnnnnnnnnnnnnnnnnnnnnnnnnnnnnnnnnnnnnnnnnnnnnnnnnnnnnnnnnnnnnnnnnnnnnnnnnnnnnnnnnnnnnnnnnnnnnnnnnnnnnnnnnnnnnnnnnnnnnnnnnnnnnnnnnnnnnnnnnnnnnnnnnnnnnnnnnnnnnnnnnnnnnnnnnnnnnnnnnnnnnnnnnnnnnnnnnnnnnnnnnnnnnnnnnnnnnnnnnnnnnnnnnnnnnnnnnnnnnnnnnnnnnnnnnnnnnnnnnnnnnnnnnnnnnnnnnnnnnnnnnnnnnnnnnnnnnnnnnnnnnnnnnnnnnnnnnnnnnnnnnnnnnnnnnnnnnnnnnnnnnnnnnnnnnnnnnnnnnnnnnnnnnnnnnnnnnnnnnnnnnnnnnnnnnnnnnnnnnnnnnnnnnnnnnnnnnnnnnnnnnnnnnnnnnnnnnnnnnnnnnnnnnnnnnnnnnnnnnnnnnnnnnnnnnnnnnnnnnnnnnnnnnnnnnnnnnnnnnnnnnnnnnnnnnnnnnnnnnnnnnnnnnnnnnnnnnnnnnnnnnnnnnnnnnnnnnnnnnnnnnnnnnnnnnnnnnnnnnnnnnnnnnnnnnnnnnnnnnnnnnnnnnnnnnnnnnnnnnnnnnnnnnnnnnnnnnnnnnnnnnnnnnnnnnnnnnnnnnnnnnnnnnnnnnnnnnnnnnnnnnnnnnnnnnnnnnnnnnnnnnnnnnnnnnnnnnnnnnnnnnnnnnnnnnnnnnnnnnnnnnnnnnnnnnnnnnnnnnnnnnnnnnnnnnnnnnnnnnnnnnnnnnnnnnnnnnnnnnnnnnnnnnnnnnnnnnnnnnnnnnnnnnnnnnnnnnnnnnnnnnnnnnnnnnnnnnnnnnnnnnnnnnnnnnnnnnnnnnnnnnnnnnnnnnnnnnnnnnnnnnnnnnnnnnnnnnnnnnnnnnnnnnnnnnnnnnnnnnnnnnnnnnnnnnnnnnnnnnnnnnnnnnnnnnnnnnnnnnnnnnnnnnnnnnnnnnnnnnnnnnnnnnnnnnnnnnnnnnnnnnnnnnnnnnnnnnnnnnnnnnnnnnnnnnnnnnnnnnnnnnnnnnnnnnnnnnnnnnnnnnnnnnnnnnnnnnnnnnnnnnnnnnnnnnnnnnnnnnnnnnnnnnnnnnnnnnnnnnnnnnnnnnnnnnnnnnnnnnnnnnnnnnnnnnnnnnnnnnnnnnnnnnnnnnnnnnnnnnnnnnnnnnnnnnnnnnnnnnnnnnnnnnnnnnnnnnnnnnnnnnnnnnnnnnnnnnnnnnnnnnnnnnnnnnnnnnnnnnnnnnnnnnnnnnnnnnnnnnnnnnnnnnnnnnnnnnnnnnnnnnnnnnnnnnnnnnnnnnnnnnnnnnnnnnnnnnnnnnnnnnnnnnnnnnnnnnnnnnnnnnnnnnnnnnnnnnnnnnnnnnnnnnnnnnnnnnnnnnnnnnnnnnnnnnnnnnnnnnnnnnnnnnnnnnnnnnnnnnnnnnnnnnnnnnnnnnnnnnnnnnnnnnnnnnnnnnnnnnnnnnnnnnnnnnnnnnnnnnnnnnnnnnnnnnnnnnnnnnnnnnnnnnnnnnnnnnnnnnnnnnnnnnnnnnnnnnnnnnnnnnnnnnnnnnnnnnnnnnnnnnnnnnnnnnnnnnnnnnnnnnnnnnnnnnnnnnnnnnnnnnnnnnnnnnnnnnnnnnnnnnnnnnnnnnnnnnnnnnnnnnnnnnnnnnnnnnnnnnnnnnnnnnnnnnnnnnnnnnnnnnnnnnnnnnnnnnnnnnnnnnnnnnnnnnnnnnnnnnnnnnnnnnnnnnnnnnnnnnnnnnnnnnnnnnnnnnnnnnnnnnnnnnnnnnnnnnnnnnnnnnnnnnnnnnnnnnnnnnnnnnnnnnnnnnnnnnnnnnnnnnnnnnnnnnnnnnnnnnnnnnnnnnnnnnnnnnnnnnnnnnnnnnnnnnnnnnnnnnnnnnnnnnnnnnnnnnnnnnnnnnnnnnnnnnnnnnnnnnnnnnnnnnnnnnnnnnnnnnnnnnnnnnnnnnnnnnnnnnnnnnnnnnnnnnnnnnnnnnnnnnnnnnnnnnnnnnnnnnnnnnnnnnnnnnnnnnnnnnnnnnnnnnnnnnnnnnnnnnnnnnnnnnnnnnnnnnnnnnnnnnnnnnnnnnnnnnnnnnnnnnnnnnnnnnnnnnnnnnnnnnnnnnnnnnnnnnnnnnnnnnnnnnnnnnnnnnnnnnnnnnnnnnnnnnnnnnnnnnnnnnnnnnnnnnnnnnnnnnnnnnnnnnnnnnnnnnnnnnnnnnnnnnnnnnnnnnnnnnnnnnnnnnnnnnnnnnnnnnnnnnnnnnnnnnnnnnnnnnnnnnnnnnnnnnnnnnnnnnnnnnnnnnnnnnnnnnnnnnnnnnnnnnnnnnnnnnnnnnnnnnnnnnnnnnnnnnnnnnnnnnnnnnnnnnnnnnnnnnnnnnnnnnnnnnnnnnnnnnnnnnnnnnnnnnnnnnnnnnnnnnnnnnnnnnnnnnnnnnnnnnnnnnnnnnnnnnnnnnnnnnnnnnnnnnnnnnnnnnnnnnnnnnnnnnnnnnnnnnnnnnnnnnnnnnnnnnnnnnnnnnnnnnnnnnnnnnnnnnnnnnnnnnnnnnnnnnnnnnnnnnnnnnnnnnnnnnnnnnnnnnnnnnnnnnnnnnnnnnnnnnnnnnnnnnnnnnnnnnnnnnnnnnnnnnnnnnnnnnnnnnnnnnnnnnnnnnnnnnnnnnnnnnnnnnnnnnnnnnnnnnnnnnnnnnnnnnnnnnnnnnnnnnnnnnnnnnnnnnnnnnnnnnnnnnnnnnnnnnnnnnnnnnnnnnnnnnnnnnnnnnnnnnnnnnnnnnnnnnnnnnnnnnnnnnnnnnnnnnnnnnnnnnnnnnnnnnnnnnnnnnnnnnnnnnnnnnnnnnnnnnnnnnnnnnnnnnnnnnnnnnnnnnnnnnnnnnnnnnnnnnnnnnnnnnnnnnnnnnnnnnnnnnnnnnnnnnnnnnnnnnnnnnnnnnnnnnnnnnnnnnnnnnnnnnnnnnnnnnnnnnnnnnnnnnnnnnnnnnnnnnnnnnnnnnnnnnnnnnnnnnnnnnnnnnnnnnnnnnnnnnnnnnnnnnnnnnnnnnnnnnnnnnnnnnnnnnnnnnnnnnnnnnnnnnnnnnnnnnnnnnnnnnnnnnnnnnnnnnnnnnnnnnnnnnnnnnnnnnnnnnnnnnnnnnnnnnnnnnnnnnnnnnnnnnnnnnnnnnnnnnnnnnnnnnnnnnnnnnnnnnnnnnnnnnnnnnnnnnnnnnnnnnnnnnnnnnnnnnnnnnnnnnnnnnnnnnnnnnnnnnnnnnnnnnnnnnnnnnnnnnnnnnnnnnnnnnnnnnnnnnnnnnnnnnnnnnnnnnnnnnnnnnnnnnnnnnnnnnnnnnnnnnnnnnnnnnnnnnnnnnnnnnnnnnnnnnnnnnnnnnnnnnnnnnnnnnnnnnnnnnnnnnnnnnnnnnnnnnnnnnnnnnnnnnnnnnnnnnnnnnnnnnnnnnnnnnnnnnnnnnnnnnnnnnnnnnnnnnnnnnnnnnnnnnnnnnnnnnnnnnnnnnnnnnnnnnnnnnnnnnnnnnnnnnnnnnnnnnnnnnnnnnnnnnnnnnnnnnnnnnnnnnnnnnnnnnnnnnnnnnnnnnnnnnnnnnnnnnnnnnnnnnnnnnnnnnnnnnnnnnnnnnnnnnnnnnnnnnnnnnnnnnnnnnnnnnnnnnnnnnnnnnnnnnnnnnnnnnnnnnnnnnnnnnnnnnnnnnnnnnnnnnnnnnnnnnnnnnnnnnnnnnnnnnnnnnnnnnnnnnnnnnnnnnnnnnnnnnnnnnnnnnnnnnnnnnnnnnnnnnnnnnnnnnnnnnnnnnnnnnnnnnnnnnnnnnnnnnnnnnnnnnnnnnnnnnnnnnnnnnnnnnnnnnnnnnnnnnnnnnnnnnnnnnnnnnnnnnnnnnnnnnnnnnnnnnnnnnnnnnnnnnnnnnnnnnnnnnnnnnnnnnnnnnnnnnnnnnnnnnnnnnnnnnnnnnnnnnnnnnnnnnnnnnnnnnnnnnnnnnnnnnnnnnnnnnnnnnnnnnnnnnnnnnnnnnnnnnnnnnnnnnnnnnnnnnnnnnnnnnnnnnnnnnnnnnnnnnnnnnnnnnnnnnnnnnnnnnnnnnnnnnnnnnnnnnnnnnnnnnnnnnnnnnnnnnnnnnnnnnnnnnnnnnnnnnnnnnnnnnnnnnnnnnnnnnnnnnnnnnnnnnnnnnnnnnnnnnnnnnnnnnnnnnnnnnnnnnnnnnnnnnnnnnnnnnnnnnnnnnnnnnnnnnnnnnnnnnnnnnnnnnnnnnnnnnnnnnnnnnnnnnnnnnnnnnnnnnnnnnnnnnnnnnnnnnnnnnnnnnnnnnnnnnnnnnnnnnnnnnnnnnnnnnnnnnnnnnnnnnnnnnnnnnnnnnnnnnnnnnnnnnnnnnnnnnnnnnnnnnnnnnnnnnnnnnnnnnnnnnnnnnnnnnnnnnnnnnnnnnnnnnnnnnnnnnnnnnnnnnnnnnnnnnnnnnnnnnnnnnnnnnnnnnnnnnnnnnnnnnnnnnnnnnnnnnnnnnnnnnnnnnnnnnnnnnnnnnnnnnnnnnnnnnnnnnnnnnnnnnnnnnnnnnnnnnnnnnnnnnnnnnnnnnnnnnnnnnnnnnnnnnnnnnnnnnnnnnnnnnnnnnnnnnnnnnnnnnnnnnnnnnnnnnnnnnnnnnnnnnnnnnnnnnnnnnnnnnnnnnnnnnnnnnnnnnnnnnnnnnnnnnnnnnnnnnnnnnnnnnnnnnnnnnnnnnnnnnnnnnnnnnnnnnnnnnnnnnnnnnnnnnnnnnnnnnnnnnnnnnnnnnnnnnnnnnnnnnnnnnnnnnnnnnnnnnnnnnnnnnnnnnnnnnnnnnnnnnnnnnnnnnnnnnnnnnnnnnnnnnnnnnnnnnnnnnnnnnnnnnnnnnnnnnnnnnnnnnnnnnnnnnnnnnnnnnnnnnnnnnnnnnnnnnnnnnnnnnnnnnnnnnnnnnnnnnnnnnnnnnnnnnnnnnnnnnnnnnnnnnnnnnnnnnnnnnnnnnnnnnnnnnnnnnnnnnnnnnnnnnnnnnnnnnnnnnnnnnnnnnnnnnnnnnnnnnnnnnnnnnnnnnnnnnnnnnnnnnnnnnnnnnnnnnnnnnnnnnnnnnnnnnnnnnnnnnnnnnnnnnnnnnnnnnnnnnnnnnnnnnnnnnnnnnnnnnnnnnnnnnnnnnnnnnnnnnnnnnnnnnnnnnnnnnnnnnnnnnnnnnnnnnnnnnnnnnnnnnnnnnnnnnnnnnnnnnnnnnnnnnnnnnnnnnnnnnnnnnnnnnnnnnnnnnnnnnnnnnnnnnnnnnnnnnnnnnnnnnnnnnnnnnnnnnnnnnnnnnnnnnnnnnnnnnnnnnnnnnnnnnnnnnnnnnnnnnnnnnnnnnnnnnnnnnnnnnnnnnnnnnnnnnnnnnnnnnnnnnnnnnnnnnnnnnnnnnnnnnnnnnnnnnnnnnnnnnnnnnnnnnnnnnnnnnnnnnnnnnnnnnnnnnnnnnnnnnnnnnnnnnnnnnnnnnnnnnnnnnnnnnnnnnnnnnnnnnnnnnnnnnnnnnnnnnnnnnnnnnnnnnnnnnnnnnnnnnnnnnnnnnnnnnnnnnnnnnnnnnnnnnnnnnnnnnnnnnnnnnnnnnnnnnnnnnnnnnnnnnnnnnnnnnnnnnnnnnnnnnnnnnnnnnnnnnnnnnnnnnnnnnnnnnnnnnnnnnnnnnnnnnnnnnnnnnnnnnnnnnnnnnnnnnnnnnnnnnnnnnnnnnnnnnnnnnnnnnnnnnnnnnnnnnnnnnnnnnnnnnnnnnnnnnnnnnnnnnnnnnnnnnnnnnnnnnnnnnnnnnnnnnnnnnnnnnnnnnnnnnnnnnnnnnnnnnnnnnnnnnnnnnnnnnnnnnnnnnnnnnnnnnnnnnnnnnnnnnnnnnnnnnnnnnnnnnnnnnnnnnnnnnnnnnnnnnnnnnnnnnnnnnnnnnnnnnnnnnnnnnnnnnnnnnnnnnnnnnnnnnnnnnnnnnnnnnnnnnnnnnnnnnnnnnnnnnnnnnnnnnnnnnnnnnnnnnnnnnnnnnnnnnnnnnnnnnnnnnnnnnnnnnnnnnnnnnnnnnnnnnnnnnnnnnnnnnnnnnnnnnnnnnnnnnnnnnnnnnnnnnnnnnnnnnnnnnnnnnnnnnnnnnnnnnnnnnnnnnnnnnnnnnnnnnnnnnnnnnnnnnnnnnnnnnnnnnnnnnnnnnnnnnnnnnnnnnnnnnnnnnnnnnnnnnnnnnnnnnnnnnnnnnnnnnnnnnnnnnnnnnnnnnnnnnnnnnnnnnnnnnnnnnnnnnnnnnnnnnnnnnnnnnnnnnnnnnnnnnnnnnnnnnnnnnnnnnnnnnnnnnnnnnnnnnnnnnnnnnnnnnnnnnnnnnnnnnnnnnnnnnnnnnnnnnnnnnnnnnnnnnnnnnnnnnnnnnnnnnnnnnnnnnnnnnnnnnnnnnnnnnnnnnnnnnnnnnnnnnnnnnnnnnnnnnnnnnnnnnnnnnnnnnnnnnnnnnnnnnnnnnnnnnnnnnnnnnnnnnnnnnnnnnnnnnnnnnnnnnnnnnnnnnnnnnnnnnnnnnnnnnnnnnnnnnnnnnnnnnnnnnnnnnnnnnnnnnnnnnnnnnnnnnnnnnnnnnnnnnnnnnnnnnnnnnnnnnnnnnnnnnnnnnnnnnnnnnnnnnnnnnnnnnnnnnnnnnnnnnnnnnnnnnnnnnnnnnnnnnnnnnnnnnnnnnnnnnnnnnnnnnnnnnnnnnnnnnnnnnnnnnnnnnnnnnnnnnnnnnnnnnnnnnnnnnnnnnnnnnnnnnnnnnnnnnnnnnnnnnnnnnnnnnnnnnnnnnnnnnnnnnnnnnnnnnnnnnnnnnnnnnnnnnnnnnnnnnnnnnnnnnnnnnnnnnnnnnnnnnnnnnnnnnnnnnnnnnnnnnnnnnnnnnnnnnnnnnnnnnnnnnnnnnnnnnnnnnnnnnnnnnnnnnnnnnnnnnnnnnnnnnnnnnnnnnnnnnnnnnnnnnnnnnnnnnnnnnnnnnnnnnnnnnnnnnnnnnnnnnnnnnnnnnnnnnnnnnnnnnnnnnnnnnnnnnnnnnnnnnnnnnnnnnnnnnnnnnnnnnnnnnnnnnnnnnnnnnnnnnnnnnnnnnnnnnnnnnnnnnnnnnnnnnnnnnnnnnnnnnnnnnnnnnnnnnnnnnnnnnnnnnnnnnnnnnnnnnnnnnnnnnnnnnnnnnnnnnnnnnnnnnnnnnnnnnnnnnnnnnnnnnnnnnnnnnnnnnnnnnnnnnnnnnnnnnnnnnnnnnnnnnnnnnnnnnnnnnnnnnnnnnnnnnnnnnnnnnnnnnnnnnnnnnnnnnnnnnnnnnnnnnnnnnnnnnnnnnnnnnnnnnnnnnnnnnnnnnnnnnnnnnnnnnnnnnnnnnnnnnnnnnnnnnnnnnnnnnnnnnnnnnnnnnnnnnnnnnnnnnnnnnnnnnnnnnnnnnnnnnnnnnnnnnnnnnnnnnnnnnnnnnnnnnnnnnnnnnnnnnnnnnnnnnnnnnnnnnnnnnnnnnnnnnnnnnnnnnnnnnnnnnnnnnnnnnnnnnnnnnnnnnnnnnnnnnnnnnnnnnnnnnnnnnnnnnnnnnnnnnnnnnnnnnnnnnnnnnnnnnnnnnnnnnnnnnnnnnnnnnnnnnnnnnnnnnnnnnnnnnnnnnnnnnnnnnnnnnnnnnnnnnnnnnnnnnnnnnnnnnnnnnnnnnnnnnnnnnnnnnnnnnnnnnnnnnnnnnnnnnnnnnnnnnnnnnnnnnnnnnnnnnnnnnnnnnnnnnnnnnnnnnnnnnnnnnnnnnnnnnnnnnnnnnnnnnnnnnnnnnnnnnnnnnnnnnnnnnnnnnnnnnnnnnnnnnnnnnnnnnnnnnnnnnnnnnnnnnnnnnnnnnnnnnnnnnnnnnnnnnnnnnnnnnnnnnnnnnnnnnnnnnnnnnnnnnnnnnnnnnnnnnnnnnnnnnnnnnnnnnnnnnnnnnnnnnnnnnnnnnnnnnnnnnnnnnnnnnnnnnnnnnnnnnnnnnnnnnnnnnnnnnnnnnnnnnnnnnnnnnnnnnnnnnnnnnnnnnnnnnnnnnnnnnnnnnnnnnnnnnnnnnnnnnnnnnnnnnnnnnnnnnnnnnnnnnnnnnnnnnnnnnnnnnnnnnnnnnnnnnnnnnnnnnnnnnnnnnnnnnnnnnnnnnnnnnnnnnnnnnnnnnnnnnnnnnnnnnnnnnnnnnnnnnnnnnnnnnnnnnnnnnnnnnnnnnnnnnnnnnnnnnnnnnnnnnnnnnnnnnnnnnnnnnnnnnnnnnnnnnnnnnnnnnnnnnnnnnnnnnnnnnnnnnnnnnnnnnnnnnnnnnnnnnnnnnnnnnnnnnnnnnnnnnnnnnnnnnnnnnnnnnaggctggagtgcagtggcgtgatctcggctcactgcaagctccgccttccgggttcatgccattctcctgcctcagcctctcaagtagctgggactacaggcacccgccaccacgcccggctaactttttatatttttagtagagacggggtttcaccgtgttagccaggatggtcttgatctcctgacttcgtgatctgcccgtctcggcttcccaaagtgctgggattacaggcgtgagccaccgcgcctgacccaatgtttcttaaaatacatccaaacataaaaagaacaaggatgtttatagctggtatatcaccatagccatcactataacaccgtaacaaacatgcaaatttgttacaaatctaattctcaaatgaataccattcaaattaatagcatgattttaatgtgacaggtgatgctattttattaaaactctatcatctgtgctcaggaagtcatggctactagggtaagttttcctttcctaaccaattatgtgccagttggtggtaacataacaccgttttcctttgtttcctttattcaaacttctcttgtactatgtactagagcatgaacacgtctttgacctacagttatgttagctggagacacagcagaactactgttgtcatcttgatcctgaatacaagggccgattgaagccccagaaatcatggggaagtactcgtttacataaagtggtcatgtagataatctaaaatatgaccgttagtgtattaagatcataactgcctaaagcttcctgtgccaggagtggtcttagctctcaaagaagtcatagtctggccaggcgtgatgactcatccctctcatctcagcactttgggaggcgaaaggattgcttgaggccaggagtttgagaccagcccgggcaacatagcttgatcccgtttcttaaaaaatggaagtgatatccaggtggggaaaccttcctgctgtagtggagcctcttgagatggcacacgtattttgctcacaggtgctatcaatatatagctctggttcttcagaatataaataactatcacctgaccccaataccttatctatattgagattgttcattagatccaaaacatcttgtgcatttcttgctttttagtcatgcacagaccttgtctttactttcaaagacagtttggtactgaaaattgctctggtaaattaacacaatttatttaatccctgctctttccaatctttagcaacgtttttttcattgtcaccatcagttgaccttgctgagcttccaagtggcaattgcttttgttgtattgtttaaaggcaaacaaaaatcaattattattggctctagagtgcctggcgaggtggagctcagttctttgtgcattgcgcactatgctgctggtgtctcagctgccatgcttatggttgcattactttcctgtctagctttggtattcttgcctttaaaaatttctttttccatttgcttttcttagccagtgatgacagtaaaataaggaacgacctatttattgttttaagagatacgctggatggtgcccaggcagatgagcattgccattcaaggtggcttcttggtagactgcatttactcttaatcgggtgcctgtgggtcagtgcatttcttggtcatccttactctgtcaaagctgccttgttagccaggttactagccatactagtctcattaccttacgataacacctcattcaaatggccttaacgaagttgaacacttatcttagtcactatggttggctttgaaccttttctagaagttaagtttattccctgggaaaaaacgtgtttgccaccacacagagtgctgggtgtactgggaacccggcttcaaaggcaactactccagtagggaaggttgaggagggtattgaatgatagctcactgcttaaataagtgtttagagtcccaaggtatatgtaatggcatatgaaatgcctagtgtttaaagaatattcagaaataatcagtcatactctttaatattcatatctcatagagttagcatcaggaaggaaacttggtagattaaataaaatagcagaaattactgctggatttttgtacagtagaaatgtatgcacatttttctcccctagtagtcacttaagttgcatatccatttcctgttacatctcatgacatgttttgggtaaaccgtttttggaagcgtccatttgtgtagaagttaggtggttctgagtttaactttgtacacatttctaggcacgaggaaattaaataactggctgagtgagagtgatctcgttgaatgctgaggcttgtttgggaattgggtttattttggtgaaatttgtaaatttagatccactctgtattagttttttttttttttttttttttaacggagtctctctctttcacccaggctgaagtgcagtggcatgatctcagcttactgccaccatgccaggctaacttttgtatttttagtagagacggggtttcaaccatgttggccaggctggtcttgaacgcctgacctcgtgttccactcaccttggcctcccaaactgctaggattacaagcatgagccatcgcgcccggccaagtccgtttttacactcctataacgacatacatgagactgcgtaatttataaagaaaagaggtttaattggctcacgattctgcaggttgtacaggcttctgcttctggggaggcctcaggaaacttacagtcataagggaaggtgaagaggaagcaagcatgtcttacatggaagaatcaggaggaagaggggtggggtgccacatatttttaaataaccaagcacagactcactatcacgagagcaacactgaggggcaaaatccactcccatcatctcatctccttgtaccaggcccctcctacaacactggggattgcaattccacatgagatttgagttgggacacaaatctaaaccatataaccctcatacacatgtattgtaattcagaatttgtcattttaaaaaaaaatttttaagattagcttatcaatttaaatgtttccagccctgaactctcaaagtcaactttaatgagttttgatttttgccgagaaagatcaacagcagaagaaagagaagtataacaaaacttagctccacaggagcaaactggagaattggagtactggtttatgattttggtcagttaagcagaatgcagtcctagtttaaacaagactggataaaagtccaaattcaaataccattcttacaagtgtttgaatttaattttgtcagtgtacatacatatatctagtaccatagtgatctcaggctttgaagaatgaaaagcaaaagaaatgatttagagtcctggtccaaccactcagctatctgatatccttttgctattttcgtttaaggggttatcagggaatgagctaatttgacattttctgcttaaagcaatggttggggctgggttggggtggagagagctgctctgaggaggtggtgtggggggcctgcgaggacacacttgggttacctggtacatctgcagttcccatggaattgggtctcaaaactgagaaatggaagtgtgagctaggaagaggagtagcttaatggggactttgccacacttttagtgctcctgtagctgcacacatgttgttctttgtaatgtatgatttgtgtcccagtggaacacttgaggagtgggagctggagaaaggaatgttgtacagtgttgtgcagatgtgggtgagatgaggtgatctgggaagctggcagtcttagttggcccaggaatgccaggacctgagatgacagctgctggtggcagcggggaatgcaggtgtatctgtgtcgaggttgggaattggactttgaagggctgggacttccagaaggtaaaatgggattgcactgtttgggagaaggggtacagatttttttgtttgcttttgagataaggtctccctctgtcacccaggctggagtgcagctgtgtgatcatagctcattgcagcctcaacctcctaggctcaagcaatcctccttcctcagcctcctgagtagctgggactacagacatgtgccactacacccagtgaatttttttttcttaaagatgaggtattgctatgttgcccagactgatcttgaactcctagaattctttttttttttttttttgttttgttttgagacggagtctcgctctgttgcccaggctggagtgcagtggcatgatcttggctcattgcaaactccgcctcccaggttcaccccattctcctgcctcagcctcctgagcagctgagactacaggcgcctgccaccacgcctgactaattttttgtatttttagtagagacggggtttcaccatgttagccaggatggtcttgatctcctgaccttgtgatccacctgcctcggcctcccaaagtgctgggattacaggcatgagccaccgctcacagccgaactcctagaattcttaaacattaaggacagaaacatctctgttcttaatcatgatttgcttttagtctcagcagatggaaaaatgatttacttgcaaagtgagagagctagatgaggaaggaaagaatatgattttgtaccactcagagaaaaatgtgagcatttctctactgtcttgggttggttattttccgttgattcaaaattgctctgcaggagacataggagaggcttgagagatgtcagtgggtggccatggctcagccttgatcctgagtgggtgggaatactctgttaatggggcaaagtggaccctccaggtccttcatgctccttttggaaagaagcgttcctggccagacacagtggcttacgcctgtaatcccagcactttgggaggctgaggcaggcagatcatttgaggtcaggagttcaagatcagcctggccaacatggcaaaaccccgtctctactaaaaatataaaaattagctgggtgtgatgatgtgcacctgtagtcccagctacttcagagctgaggcacaagaatcgcttgaacctgggaggtggaggttgcagtgagccaagatcgtacccctgtgctccagcctgtgtgatagagtgagaatctgtctccaaaaaaaaaaaaaaaaaaaaaaataggaaagaaaatatatgttcccctgtggttccctgttataccctcttctcttgaatagtttatcagaagggacaaccagctcctcatgcccttcctcagcaagtgtcaacagtgtgggagtgcagttgataaagcttgattttcacaactctgcaagtagctgagctccaccagtgttagaactgaaattgaggttatctcaccaggaaccaactttcagatgttgaagccagtagaaatttagtaatgtgggaaactgataactaaaagtattccaggttctaattattttgtcagctcagttttaggaagcagtcctagggattcccctggaagaaagtttggctggatagagggcagtgattgtgaattttctagatcttttgtggactgcttctgttgttaaaaaagcagcagtctctcagcacacgaatgggaagtgttaatgctgtaactgagtaacactgatactgagtttaaaataatggtaaatatcccactgaaatttcacccccagtacagattagggccttggaatgctggatagtggattaaggacatctgaaaatctacttcataaaagcagtgagaacattggcaaaacctattaatttcaagtttttcagaaccatggaaattagttaaagatttctagcaatctgaggaatgattgttcaagaaaacactgggatctcagtaggaacagtgaaccttgtgttttaacctgctgcaatcccattcccggcccctgaccacctccttggtggccttgaaaaccagcagcctcacagccatggcagctgtgaaactcagaagtctgttaaaccactggaagggacagaacagaactggagctcttgaaggaccatcctcaaagaaatgtcacaattcgaccatttggcagcttgcttgaaagggcctttctgagggctttgtctttgtttcacccaacacaggtcagctcacattgtgcaaacagctctacctgctgagcatttgttgaaaacaatcggtggtagttgtttaatcacagctgtctgaggtggtgttgctaattgaggccaagtggctgaccaaaaaattttttatttttattttatttatttatttatttatttttttgagacagggtctctctctgtcacctagcctggagtgcagtggtgtaatcgtgactcactgcagcctcaacctcctgaatttaagtgattggtcctcccacctcagcttcccaagtaggtgggaacacagatatgtgccaccatgcccagctaatcttttaattttttttgtagagatggagtctccctatgttacccaggctcaaacagtttttttaaaatggagaagtaaatgttccttgacgacttcaaaaagctccaacatattcctgggaatctagaaggctctgagcattctgagaaggctctaccttctctgctgtggcgatcttgaggctttatgcaagcctcaaggaagactaaggtagaattataaaccattcagcagagtgttgaaggcatgccccaatacccacacccacacgccctctcacctacccacccacccacccttagtaaaggctggaaaatttattaattcaaggcatgtaaggaaatctctgtgtagttactagcgaaccactaaactaagagtcttcagtggccatacatggcaaacaaaaaacaaaacaaacagactttatagaattagttcctgaaaatcactaatcagatagcaacaaaacaaaccctgggatgggggaagaatttgatttttagaattgacacattgtattagataaaatttctagtctttgacaaaaattagaagctatctcaagaaacaggaagatatgtcccatatacaggttaaaaaaacacacacacacacacacctcggtttctgcctagtttctaggatagaaactgtccttgatgaagcgcagatgttgggcatacttaaaacttaagtcactatgaaagttatgttcaaataactataggaaagcatgtctaaagaatcacatgaaaatatgcttgtgaggttgaagccaggaggattgcttgagcccaggagtttgaggctgcagtgagccatggtcatgatcaggccactgtactccagtctgggtgacagagcaagactctgcctcttaaaaaaaatattgggtgaccaaacagagaatgggaataaagaagtagagattataaaaaaaagaaccaatagaaattctggagtcataaactctagtaactgaaatgaagaattcactggaggggcttagcaggtatgaactggcagaagaatcagtgaactggaagacaggtcatttgagatagttcagtctgaacagcaaaaataaaagaatagaaaaatgaacaaagccttagagacctgtgtaacatcatcaaccatacccataatgggagtcccagaagagggaagatgtaaagggaaaaagaaggtatactgtgaatagttgtgtgtttgttctcatgccgctaataaagacatacctgggactgagtaatttataaaggaaagaggtttaattgacttacagttccacatggctggggaggcctcacaatcatggcagaaggcgaatgaggtgcaaagtcatgtcttacatggcaccaggcaagaataggagttgtgccggggaactcccatttataaaaccatcagatctcatgagacttattcagtaccatgagaacagtatgggagaaacttcccttatgattcagttatctccaccttatcctgcccttgacatgtggggattacaattcaaggtgagatttgggtggggacacagagccaaaccatatcaagttgtatgccaacaaattaggtaacctaaatggaatttatacaaattcatgtagatgcaaatggccataactgactaaagaatttgaaaatctgaataggccaataacaggtaaagagattgaaatagcaatcaggaaaccttccaccaaaaaatactgggtcacatggtttactgggtaaattcactgggtgaattctaccgagtattattataaactctttcaaaattttataattaacctgataccaaactaaagacatcacaagaaaactatggaacaatatcccttataaatacagaggccaaaatcctcagtgcaatgctagctttcctcccattctcactacttgtattctgtcataaaaaaaggattgtacaccgtgacaaagtggaatttatcccaggaacaaaaacttggttcaccataccaaaaccactcaatgtaatctgtcatgttaatagaataaaagacaaaaaccacatgatcatctcagtaaatgcaggaaaatcatttgataatattcagtactttttcttgatgaaaactatcaactagtaatagaaggaaaattctacaatttgataaagactgtctatgaaaaactcacagttaacatcatacttcatggtgagaaattgcatgctttctcctaagattatgagtgagacaaggatagtcattctcaccacttctatgtagcattgtactggagattctatctaggacaattagtaaaaataaaatagtaatataaataaaagcattgagattgtaatggagattggaatagaactataactagaaaagtatctgtagttacagttgacatgatcttgtatatagaaaatcctaaggcgcgcgcgcgcgcgcacacacacacacacacacacacacacacacacacaaatcttgaactaataattgagtttacaagcttgtacatacaagaacattgaagcatccagaaatgaaattaataaaacaattccatgatacagtagtatcaaaaagaataaaatacttgggaataagtttaataagtttatgatttgtacacaaactataaaacattcttgaaggaaagtaaagaagacctaaaaaacaaaagaaaggacattccatgttcacggattagaagacttacattgttaatacggccaatactccccagattgagctgcagatggagtgcaatacctacaaaatcccagctggcttttttttttctcagaaattaacaagtttattttaaaaatcacatggaaatgtaagggacccagaataaccaaaacaaccttgaaaaagaacaaagctggaagactcacacttctcaatttcaaagctttgctacaaatctacagttatcaagacagtgtggtactactgtgtggacagccatagagatccatggaattgaattgagagtccagaaatagacccttaactttacagtcagttgtgtttttgacaggggtgttaggacatgaatggataaagaagatgtggtatatccatacaatgggatattattcagccattaaaccactaagctcagataaatgcatggatgaaccttgaaaacgtatggtaggtgaaagaagtcagacacaaaaggccacacgtttatttgaaaattctggaataagcaaattcagagacaagaaatagatgagtgttaatatgtgctggaggctggtgggaggggagaatagggtgtgatggtagtgggtatagagtttcctttgggatgatgaaattttctgtgattagctaatggtgatagatgcatagttttggagacacattaaaatcaatgaattatacatttgagaggggcagactttatggtatatgaaatctcaataaaacgtatttaaaaacaatatacagttaagagcgcatccagatacacctaaggtattagtaaagcggtgcattaagctgaaatatctggcttgtgcaaacttggggcatttgtaccttatgtagaattccaaaatctgcttaggattttccctgtccactggactgccactggcagggtctgcttccctgttcctgggttgagggagcagcattggagcatccctcaattcctgaatgaggaagttagttaaaagggcaatgtgagctgtagggccacactcatctaacaggtgagcttaagtttccattgatggcagacctatcagatgtttcctcccattctcactacttgtattctgtcattttgctcttatcctcccaaaatcatgctaagattttttttttttttttaagacagagtctcactctgtcccaggttggagtgcagtgatgccatctcggctcactgcaacctctgcctcccgggttcaagcaattctcctgcctcagcttcctgagtagctgggattacagttgcgtgccaccatgcctggctaattttttgtattttttttttttttttttttaatagagttggggtttcaccatgtgagccaggatagtctccatctcctgaccttgtgatccgctcacctcggcctcccaaagtgctgggattacaggcgtgaggcagtgtgtctggccactaagaatttttaaaataagtgacacaatgaagaacaaggccatagagatgatcttgggtaatttgagggtatcaaaaagtatctgcctgatggatggcttgagacactaaaaatgagtaaatgattacaaagtaaggaatgataatttgttttgaagaataaaacagattcttgtctctggtggttgagggatacgactgatgctgtatattaagacaagaagatgaagcccaaatggcagggaaattgaagagaagatacaggggtatctaggcacagggttggctgtgaaagtttcaatatgtaaaagatgataggctgaaaggaagaggatggtggaaaatacaaaagaggcattgataattcaggagtgtggagtgtgagagaagcttctccataggtgaagagttggatggacagtggttgttaggtcaaaataacaataataataacctagcacatatgtcagatatctgtttgggttcatcttacgcaccattctcttgggagggagcatgctttgaacagatccaatttatgatggagttttaggaccagaaagcgtcgtagtagcagagacttctcgtcctagagagcaaaggggaagtcattttttagttagttagtttgtgttttagacagtcttgctctgtcgccttcgcctcctggatgttcaaacagttctcccgcctcagcctcctgagtagctgggattacaggcgcacaccaccatgcccgactactttttctacttttttagtaaagatggggtttctccatgttgtccaggctggtctcgaactcctgaccttgtgatccaccctcctcagccccacaaagtactgggattacaggcgtgagccaccgcatccagccttagtttgtttctgagatagagttttgctcgtttcatcacccaagctggagtgcagtggtgtgatcatagctcactgcatcctcaaacttgtggggtcaagggatcccctcacttcagcatcccaaaatgctgggattacaggtgtgagccactgcatctagctgggaagtacttttaagagtatttttttcaggctgggtgtggcgcctcatgattgtaatccaagaggtttggaaggctgaggcgggagggtcacttgagaaaaggagttcgagaccagcctgggctaacatagcaagacccccatccctacaaaattttttttttaaattagctggtggtggtggtgtgcactggtagtcccagctactcgggagtgaggcaggaagattgcttgaatccaggaaattgaggctgcagtgaaccatgattgcaccacggcactccagcgtgagtgacagggcgagacccctccagatgatagctggagatcatgttattttcttactgattttcccccggtttagcaatacaaagtgatcgttaggttggcacaaagcacgatggaaaataaccattgttggcatcaagagaaatctcacaccacttgataaatatagtgaactagattactaaagagtgatttccctggattgcttgaaccagggctcagtgaaaatgttgctgtttgctttttttgtggtcaggattttttgattaaatgagaagcctacaaatatgcaagctagaaggtgttgtattttgggattaagccagactgtagcaggatgttagtaatttgagttgcataaactaatctggggaggcagagtgagtagctgatgtcacatgaagagcaaacccttgattccattcgtaatacataatagaacaccttcgtttctaaaactgggtgcagtaaagcataaaaaaacctttagtagctgatgaaagattctgccccaggcttgagtctattaaccagaaaaactgaaacaaaattaggcaaggtggtaagttttgctttcttttagtggaatattaggatatacagcaaatggtagcaggaccacgttgggaaaagggccaaaagactttttaaaaatcctgtttgaggtttggatccattttctttcatttttggacatacctttgagtagtgggtaaactgagagctcagtgaggtgagcctgtgtctttcagcgggcgggcgggctggagttggaactcctgtttcagtggttttcagatcctgctgatctccagaatggctccagttcccccacccctaatgctttattatgaaaaatttcaagcctgcagaaaaggtaaagaatgtacagtgagcacccatataccaaccacatggattctgcaatgaacattttaatatacctgcttttttttttttttttttgagatggagtcttgctgtgtcacccaggctggagtgcagtggtatgatctcagctcactgcaaccactgcctcctggattcaagcaattcttctgcctcagccttctgagtagctgggactacaggtgcgcgccactatacccggctaattttttgtatttttagtagagatggggttttgctaacaggccagtctggtcttgaactcctgacctcaggtaatctgcccgcctcagcctcccaaagtgctgggattacaggcgtgagccaccatacccagcctcataacggcttttttttttttttttttttttttttttttgagacagggtcccactttgtcactcagtttggagtgcagtggtgtgatctctgcagccttgacctcctggactcaagtgatcctctggcctcagcttcctgagtagctggagctacaggcatgtactaccatgcccagctaatttttgtattttttatagagataggcttttgccatgttgcccaggctggcctggaattcctgagttcaagcaatctacccacctcggcctcccaaagtactggaatctctttttttggaatacgtttcaaagcatgtgatagacatcggtacagtacagtcctaaacactgagtgtgcacgtcgttaactacagtttaatatttgttttgtttctggatcttttccagggatttttttcaagattaaattccaagcgccatgatagtttctgagttagaaggatggggcaggcccaggaatcagtactttgaaaagctcccaagtgcttcttgtgatgcatcgggtttgggatcttctgccccagggagcgcttcccgattacttcatagctaatcctcacctaaaatgcagaggtgggcagttatctttaacctgaccatagagctccatttttggttttcttggaatcttttgtttaaaacagtggttctcaaccaggggcagttttgtgcctcgagagacattggacaatgtctgggatggtttggttatcacaccagggggcatctagtgatgagagatcagggatgctgccgagcatcctgtaatgcaccggacagccccacaggatggggagttatctggaccaaaatgccaatagtgctgaggctgagaaacgtatttttttttttttttgcctaaaagaaaattgcttgctccagatgactccagacaaaccaaaataaaaataaaaagtaaaaactaaaatgacaacatgaaatgaatttttaagagccaaatgagacctttagagacaatctcatcactgcctacctggtttccgtcaaatacagatttatgctccagaaagtacctaatttattaaaataagctgatttctaaaagcttgttagatggtcagtaatctcaaactttgagtgaatttacttgaaaaggtaatgttgctggtggcctttagtttcttttaatatatcttaaatatgatatcaaagaaaaacagaacatgatgctttgggatgaatgtaatgaatgaaaagcaggattctttggcaggtaactgtgtcccaggccctgtcctgcagggtggcagggatgtgctgagctgggtgaggggggaccgctgagggcttctctcagtagttgctctgtgtagaattttctgagtgtcttgggagaatgggggcatttttcctgaaggtctcacttgactccacagtgaatggctttacctgtctcttgagtaagatgcatttctagtaatgctctgactacttagtccacgtttgactagtttttaggaaaacaatatgtacaatggaacagaaagcttacagaaataaagggcagttcttttcttgaggtgaaagtgatgtggggagccagtaggtgacaggatttgctctggcccctccgagggaggaggaagatgaaggtgaaacgtggtattggtcagtccgtttcctgcttggttgatttcagggacctgatgagacaatatggtggtgaaaacagactgctggattgcaatgggcggaactgggcttagtctctggataggtgtcagttcatttcacacctgtcattgagggaaaataatacctgtatggctgttggaagattaaatgagactatgaacgggagctgtgtggataaaatgtaccaggcactcccagtgccagaaggtgttcttgttagttctgggtgtggcgatgtgcgaagacacccgtgtctgcggggtgtgtgtgagctgcagataaccagcaggtcctgctgatgaggcaaccttcttgggagtcttggctcagttccggggtttaattacgatgtatccttgggcaagtggcttaatgtctctgattgtaatttccttcattttttcatatctaaaatgaaagaggtgcttggatattcctaagggttcatctttaggagtctgtacttctggtgtggagctttctggaaaaaggcttctgggaatctgaaatggcagtagtgatgggcgtggtaacagcagtgttcatacgcttcctcagtaattttatgtaacaaacactcacagtgtacttactgcccctgagatcttaaaaactctcactttcaactttcacgacaccctataacttaggtaactgctattatccctggtatacagatggggaaactgagcctcagagaggttggtgatttgccccaagtcatagctgggaagtggcagacctcgatgggatgcaggcaccctgccctctgggctccgatcacttggccacctccccgcatgcaccacatgggctgtggagttggaggcatttgtgggcttcaagaatgagagttggtggggagtatgtgtgaggaaccggaggggtcatttccctgggactgggattgtggaggttttgattttgcttttccctttttaaactgggtgaggtatgagcatgggaactctgtacggaatgtgtcattggagagggacagcagggacaatgaaggtagtccccagagaagtatgagaaactggcattcagtgctcatgcagaattctctttgttttaataataatacaaataataacattaatattatttttagaggcagagcctcactctgttgcccaggctggggggcagtggcacgatcatggctcactgtagccttgaactcctgggctcgagccatcctctcacctccctcagcctcctgagtagttgccatgcgtaacaccgtgccttgctaagttttaaattttttgtagagaccgggtctcactgtcttgcccaggctggtctcgaactcctggcctcaagcagtcctccaccacagcctcccagagtgctgggattaaaggtgtgagccactgcaccctgcctaggattctctgtagatggggagcccacctgggtgagatgccagacacctggctccggcatatgcacagcagtttcacacgagcgtctcttactcaggtttcagagttctggtaaaagatttaggtttgacatccaccctttgaggtttttggttctcacatgtttgataacctgaagcttgtgggtttgatatgggcagtaaagtgggattatttctgttagagatccttattccctagagactttctggtctggaaaggtgagaggctatatattcattagctggaaccaccatgtggatcatttgttggaagaactgttaggaagaagacagatattgctatagagagcagggccagatgagcgagaaggcaaatgtacttcattcctgtacctgcaggcttattagggacagatgccctcaggcggggatgtgtagcttcacttgactgctctaaataaggagcgagagggtggtgtgtgtgttaaccatcaagattaagcaagcaagaaaaagacaaaagaaagccatcatttagtaactggtggagtgagttggagcctgggagctgccccaggacaactgttatttcccttgatcttcctcaaaccctaccaggaagtgagggcaacagttccctaaagcagccccatcaagctcttaagaaagcagtttcactgggagtggggagaggtagaattgggaggtggtagagggctggggggtatgaaatgtgagggccggagtcctcagcatcggaactccagaaataaaaagttgtctgggtctttgaaagcctcctatatgataatgttacagtaacagtgttctctgctactttcaatgaataaaaaacctagggtttctcagctacagtgtgcattaagagacatttgtggtctagttttggcacttcatttctatttgggaacatgcattctgagttttagacaactagcttccaaatgaaattttggaacaccaccctttttttttttttttttttttgagatggagtcacgctctgtcgtctgggctggagtgcagtggcgcgatctcggctcactgcaagctctgcctcctgggttcacgccatgctcctgcctcagcctcccgtgtagctgggactacaggtgcctaccaccgcgcccggctaattttttatatttttagtagagacggggtttcaccgtgttagccaggaaggtctcgatctcctgacctcctgatccacccgccttggcctcccaaagtgctacgattacaggtgtgagccaccgcacccagctggaacaccacccattttttaaagcagagaatttattgttatttgcacaaaaggacgtttgaacactttaggaaatctggatgctggaattaactcggtcaaaacaaagcaaaacacacagaatctcgtatcttttcctgccctgatgctgaactgcagccttgatttatgttttgtttttccacttttgtttctgaacctatgtggtacaggctgaacccttgtccctgcttcggagcacttaccttaattattatagaaaaaaattaagagttggctgactctgtgctgaactttctggtttttttccaggcagtttctccataacaaatgcgttttgcatagaattgaaattgcctatttacctcaatgacaccatcctaatagttggtggtaactacctaatctaataatctctcattgtgtgtgatagggctatttattgtattttagagtgaaataatgcattttgtttgcattttaaaaaggaatggtacaggaaatgattgtaatccaggactaaatatacagtttgcagtctttttattctaattgctttctgatgaatatatatatatatatatatatttttttttttttttttttttcttgagatggagtcttgctcttgtcgcccagactggagtgcaatggcatgatctcagctcacttcaacccctgcctcccgggttcaagcaattctcctgcctcagcctcccaagtagctgggattacaggagcctgccacaacgcccggctaatttttgtatttttagtagagacggggtttcaccatgttggccaggctgggctcgaacttctgacctcgtgatccacccgcctctgcctcccaaagtgctgggattacaggccttctaataaatattattttacacatcgagatagtactgtttatgcattttgtatgctgcctcttaaatctataagcattttcttttcttaaaaaaaagctttgggctgggtgcattggctcatgcctgtaatcccagcactttggggggctgaggcaggtggatcacctgcggtcaggagttcaagaccagcccggccaacatggtgaaaccccgtctctgctaagaacacaaaaattagtcgggcatggtggtgcatacatgtagtcccatctacttgagcgtctgaggcaggagaattgcttgaacctgggaagcggaggttgcagtgagtggaggttgcagtgagctgagatcacaccactgcactctggcctgggtgacaagagcaagactccatctcaaaaaaaaaaaaaaaaagctttgataaatattgtacatgattgcaaagcgtcccatcgtgtggatgttcacttagttatttgatacatatttttgtgttcttgggctgtttctaatatttctgtattacaaataaggtgatgggaagcagtttcattcatcaatcattctttttaaatgtcccttcctatcagtttctgttaatcagtcaaaagcgtatacattcttagcaggaacttaaattcttagtaggaatcttaacaggttaagatttctaagggtagagagggtacctgttttgttaaccggtggcttaataccatttaataccagtaaaggctcaataaatgtttattgactgaatgaacagaaaagatcagtgatcatgaagaatggcccagttagtggtatatatacgagaagtgctgcagtggttcacagtaacatgataataactaattgtgtaatgatttggcacgaggtactgatctaaatgatttatacattgttgcatgggattttggaaggggagggagtatacctctaaattagttcatgctatgggatggaagtaagactttaaatttaggtgggctcaaaaaacagaaacaaaccaggggccgggtgcggtggctcacgcctgtaatcccagcactttgggagtctgaagcgggtggatcacgaggtcaggagatcgagaccatcctggctaacacagtgaaaccctgtctctactaaaaatacaaaaaaattagccgggcgtggtggcgggtgcctgtagttccagctactcaggaggctgaggcaggagaatggcatgaactcgggaggcagagcttgcagtcagcagaggttgcaccactgcactccagcctgggcgacagagcgagactccatctcaaaaaacaaaaaaaacaaaacaacaacaacagaaaaaaatcaaatgttcgtcagctgatgagtggataaacaaaatgtggtatatccatacaatgaatgctatgctatgctgccataaaatggagtgaaacattcatacatgttgcaatatggatgaacctgccactcaagtagctggtactacaggcatgttccaccatgcctggctaatttttgtattcttagtagagacagggtttcaccatgttggccggcctggtcttgaactcctgacctcaggtgatccacctgcctcagcccctcaaagtgctgggattacaggcgtgagccagtgcgcccggcccaaagcttttttttaagaaaagaaaatgcttatagatttaagaggcagcatacaaaatgcataaacctggaaaacattatgggaactgaacgaatccaggcacaaaagaccacatattgtgtgattccacatattccacatattgtgtgattatatggaatgtttggaacaggcaaatccacagagacggaaagtagattagtggtggcatagggctggaagaggaaggaaacaaggactaactgctaatgggtacaggattttttttcctcaagtgatgaaatattcttagattatgaggatgcttgtacgactctgtggatatactcaaaacgatttaattgtatactctaaatgggtaaattgtgtataaattatgtctaaataaaaccatgaaaaattggatgaggtttagcattgtagaaggaaagatgggggtggtggtgtgttagtttttgagggctgccatagcaaaacaccacacactgggtggcttaaacagtaaccatttattttctcacagttctggaggctagaagtccaaaatcaagatgtcagcaggtttggttttccctgaagcctctctccttggcttgcagatggccacctggccaccttctcactatatcttgtggggtttttgtgtgtgtgtgtgtgtgtgtgtgtgtgtgtgtgtgtgtgtgtgtttgagacagggtcttcctctgtcacctaggctggaatgcagtggtatgatcatggctcattgcagcctcaacttcctgggctcaagagatcctcccaccccagcctccagagtagctgggactacaggtgtgtgccgcaatgcccagctaagtttcgtaattttggtagagactgggtcttcctatgttgcccagcctggtcttgaattcctgggctcaagtgatcctcccacctcagccccccaacatgctaggattgcaggtgtgagccactgcgcccagcctggtcttgtctttgggcacaaatatccgctagtgtctcattgcgtgtccacatttcctcatcagctctattggattagagcccagcgtaatggcctcattttaacttaatcacttctttaaagtcccagtctccaaatacagtcccattctgaggtagtgaaggttaaggctccaatgtgaattctgggggaacatggttcaacccaatgagaacaatggttatctgttgggagtgaggactgatatgagtggagatgcatcggtaaagatgcgcggaccacagatgtgacgcagcaggtgtgcacagaggtatgggatggggtcagtgtggagggccgtgtgccaggcagcagtgtggacttggtcctctacccagcgtaggggggtcattctgggggctgaaccgagggtgacactgtaaaaccatgcttcaggaaaattcatctctgcgccctggaggatggactgaggagggaagaggctgagggaaatgagtgtgcaagataatgaggcgatcccaagggaagtaaaaggattggaggccttgcaaaagcaaagcgaacccaagcttcagaacggaggcatctgagatgatgtcacagttttgaaccttatttatagaagaaagagggtgaaatggggaattaggtaaatgaaaatataggtcccattgttggtaagatacatggagtgtcattgattcagtatttagtgtgcttttccttattttaaacagctttcatagctcacttccaaactgtatttttgcaaccaactctttttctctctctattaaaaggagaatcttttattttacactaattaacagctgattctcctaagagagttttcaggaacctaaacctcagagttagatggagacaagtgtctttgttaatcatttatgtgaggtcagattgtacaatttgtaacagattttacagctggttcctttattaagggatgggtaggattcctactaattattattttgagttttactttgtttttaaccattgaaacttgggggatgtactctttggtttgggtagattttgcttatagatattgaagtttgagttgttgaatttcatacatattttattttgacttttaatcctttaaaacatttgactctgactccattgagctctgtagaacatctgtcatccagatcttttgccagaatatagagccttgattggacaccttgccagctaatttaaagcttcccaagatgcagaatactgtgtaaaatgtcctacctgttgtgtcagaagggagaaaataagacgagattttcatatttgcttgtagatccataagaaacttgggaagaattcctaagaaactagcagtagtggttccctgcagggtgggggctctggatgtgggtgtggcaggggatgggagagactggcaggttgaggagcagggtgagagggatgtttttatgatgtacattctcatatatttattttgaactatttgaatgtattactcatgtaggaagacaaacctttactttccaaaaatattagggaaaaactttcaagtctctcatttttagcctttttgttgttctgatatttccacacaggacagacggtaacatgcccgatacattttaagtacaaacaaggctgtaagttgccttacttgactttcttcactattttctattcaaaaaagtatttttgaatccaagggaattagaggaataatcttgaaatgattatgttttgggggaaaagtatattattaatatgatagttatctaatgttgtgtaacaaattgcctccaaatttagcatatgaaaacaataagcattcattgtgtcacacattcattctttcttttcagtgaaagttaacctgtttccatctgaatagatttctcactctgtatcctgccagtaatcattttgtactgtttctgtgcctttcaatccaagagtccaacctgatgaggttctgctggtgtaattcttttaaaagcattgtggatgtcctgtgaatctcactggagttcactttttaaacattagacttctgtggagactgctgaaggacaacacccttacttcttagggcctttggtttgccagaattgttctctgagccattgccttggattttttcctgacttcttaacaaaggattttataggtgggaccttcaacactctggaaattgccttagctacattcagccatctccttaggtacattttccatctcccacattgtagcaggcaatggcgttgctaaactttccatcaggaaataacaaagatctccttttccagtttccagtaacattttcctctctacaccatcatccacagtctcctgaaaggccctccaggttctagcttttccagggctcttcaggggttttcgaactctctttttacagtctttccagttcctgcccattgccacgttccaaagtcactcacacattttaggaatttttctttttttctttttagcaagcataccaattccagttaccagaatctgttagtttttgttatgtgttgccgcagtacagattgcctcaaagcttagtggctgaaaacaaggaacattactggccaggcacagtggctcatgcctgtaatcccagcactttgagaggccgaggcgggcggatcacctgaggttgggagtttgagaccatcctgaccaacatggagaaaccccatctctactaaaaatacaaaattagctgggtgtggtggtgcatgcctgtaatcccagctactcgggaggctgaggcaggagaatctcttgaacctgggaggcggaggttacggtgagctgagatcgcaccattgcactccagcctggacagcaagagtgaaactccatctcaaaacaaacaaaccaaacaaaaatgaacatttactgccatacacacttcctgggggtcagggatcccagagtgtctccgctgtgtcagtatgtctcagggtttcctgaggctgcagtcattatgcccgctagggcttgggtgggactgaagcacctgcttccaagttgcctcactcacatacctggcaagttggtgccgttgctggcaggaagcctgcttttcttgccaggtggacttctctgaggggtgcgtgaatgccttcactacagggcagctgacttccctcaggacacatgattcaggagaccaggggaaagctgcagtgtcattttatcacataatcccagaagtaacactctgtcatttctgcaatatcctgtgggttacacgtcagcattattcattgtgagaggtgactacatgagggtgagtccaggaggcaagaattattgggggctatcatggaggtttgataacataattggtaagaaattcagatacacctcagacttgattgtggcataccagtgtgttgtaaaacttgtgagaatggcttgccttagaaagacaagtagtccatccagtgtcttattcttatgttaagttgggattgctattttgttacccttgggcctctatatacaaagcctctcatagtaatagatctaattgggttgaagtttagtattatgtatatgccctctgcttttattagtagattttactttcgtgaaaggaacatataaacttcattattgcatttttgtataaatgcagctggggacatggttttattacccaatgtccattttgtaaatatttagagaactttttttttgcatcataaatcagtataaatagaagcttggtttccattgttgccctggctatgaggaagctgagagtgaaatttgtcgttcaagtgtggcagttatgttactgactggcgtatttatattctcctttatttgatattttgctatgagatgttccagtttacttgtgggaaaaaaagccaggtgttcttgaactcaacaaatatttattgaattccacttgctggccagacagcattccatgtgccccagatatggcactggacagatagataaggtccccactcgcctacagcttccaacctggtcgtaagaaaataccttagcttttgctccataatgtggaagaattggcctcagagaaaacctaattcatatgtaccacgtttctacccattcaagttttatttcataatttttttttttttttttttttttttgagatggagtcttgctctgtcacccaggctggagtacagtggcacaatctcagttcagtgcaacctttgcctcctgggttcaagcgattctcctgcctcagcctcccgagtaggtgggattacaggtgcatgccaccatgcctgactaatcttttgtatttttagtagagatgggctttcaccatattggccagcctggtcttgaactcctgacctcaggtgatccacctgcctcagacttccaaagagctgggattacaggcgtgaaccacgatgcctggccgtatttcataattctatctttccatagaaagaattggctggggcacgtataactaatgtgagttactgatttcagaggaagcttttggaagtggttgataggcactgaatgggatggggtggtgagtggtttaaaataacacttgaacctttggattcaaatggttttaaatgcatctcagaaaagtgaaaggtgaatgggagagctacatccattgagagcaagggttcatcagctagggctgtggcttaaactaagcagatattctttcctggcagttctacaggccagaagcctaagatcaaggcgtcatgagggttggtttctctgaggctcccagacagtcatcttctccctgtgtcttcacggggtctttattctgtgtctgtgtccaaacttccttttccttttttttttttttttgagacagagtcttactctgtttcccaggctggagtgcagtggcactatctcagctcactgcaacctccatctcccaagctcaagtgactctcctgcctcagcctcctgagtagctgggattacaggtatgtgccaccacgcccggctaatttttgtaattttagtagagacggggtttcaccatgttggtcaggctggtctcgaactcctgacctcgtgatctgctcacctcgtcctcccaaagtgctgggattaccggcataagccaccatgcccagcccaaacttccttttcttagagggtgggctttatctgtggttcttagttagcctcaccttcattcttccttttggtgttacggtcttgcttactgctttgggaatggatttgttgaaactacatgtgactagtttagggacccagtaggaggttttactataagtgtaaattaacatgtgcctttgggggaccttaaaagtttttgtcattgggccatgagatctgagtgcagctggtagaacctccttgttttctttggtatgagaactcctgggcttttgttggttccttccgttttctccggtgtattaccatttcacatcacagtgatattatccagataacacccatgatttgtttttaacggagtttcactctgttgcccaggctggaatgcagcggtgcgatcttggctcactgcaaccttcacctcctggttcaagcgattctcctgcctcagcctcccaaatagctgggactgcaggtgtgcaccaccacgcctggctaatttttgtatttttagtagaggcggggattcgccatgttggccagactggacttgaattcctgacctcaattgatccacccaccttggcctcccaaagtgctgggattacaggcacgagccaatgcacctggccacacctgtgatttattttatttcatttgagatttcagactttgtcgcttgttctttctgtagaagttttttcatagaagtatgttgtttcaaaagcaaccttcaaatagtagacttagcttggatgagaatctaaaagtctttgagtccaacaaccaagcaggtcccctgtccaggaagtaccttatagctgatgtttgagtatccctgcagatgggaactcactacctcctgaagcaccttacttctacccttggaatagtaacagagattaaaatgtccttccttaatttgaggtgaaatctgccttcttgtccattttacacacactaaccttccttccaccatgcaagctgagagagagccaggttgagcctgtgtttccacaacaactcttctcagacctcctgctgccacctaccatgcacttgctcttcactggctaggttccagttgctctgtacctttcctaaagtgtggtgaccagaatttggcacagtgagggaaggttccagagccctttagtgttatcgggggcacagagcttgggctttggagtcgctcagatcttgagttgatatgcacttctttgtccttgagcaaatgattgaaccttcttggactctcagttcctcattaataaaatgaagatgaaacaagatgagatggactgtgcacatttcctgatgggggctggtatgtgctggtgcccagtgcaaagtggctgctggcagaatggtgagtcaccagtacctgctcccttcactgagtgcttcctgtgtgcctggcaccattgctcagggctttacatggacttactcatttcattttcactgcagcctagagcgtaagtaagtatttgctttatccccatcttatagatgaggcatttgattctcaaaaaggtttcatagcttgcccatgttctagcagctagtaaaaggagaagccagagttttcatttaggtgggagtcctcaacctgctttcttaactgctgtgatctgcactgtggcatgagagtttgtcttaatgtaaatgcacatgtaatagcattattcacattgcctgagactgtggaagctcctttggcaaccagatgccacaggggactcatttcatgcttttagaagacttgagccactacatgccctgggaactgtgttgcttccccactggccatcactcttgcttttgtaagggatgtcacattgagccattaagtgtcatctctggaactcatgactctgttattccacatattaggttttctttgtagctttgtgtcaactccaagccaggtaaataaatcttggaagaaccaagttacagatgtgagtaaaagaggggatggcagggggcagaagtcagggcaggccctgtgacttgccaccagcatcctcccttcgggggaggtcctttcatctgggtgctagctggaggaattggcaacgtcggagataaaggtgtagatgcaccagctgaacgtcttgctctgtttcccattttacgtataagatgggtgatggcatgctgcattcagatccccatgggtgtatttgggatttggggtgggggattgtgtgtagaaggcaggaaagattgcccagcaactctcatttgaattgagggtggaagcggttctcgggcacagtatgccaaggcccagggcgtccaagggacagagcagagatcacagatgctgaacgggtggggaaggagcactaggcagggcatttctgatgagactttgatttgggaggtacgaaagttgtatgaggaatcttgataaactgcttagagtgaatggagatgagtaggaatcaccaccattcacatactggctctgcaagccactcagcacagctctgcacctgctcttatggaggagaagacaagcagaagagaatgttctgatctagaagagttcgtgtaagagcatgaaggcaacagcacttgagatgtggtgcacatgagcaaaatttcagtttatgtggaatttaagattaacagattaaaaggtaaaattctctccctggtaccaaaaaaaaaaaaaaaatccatgtactccctctctctcttttttttttgtttttttttttggagatggagtctcgctctgtcccccaggctggagtgcagtggcatgatctcggctcactgcaagctccgcctcccaagttcacgccattctcctgcctcagccttccgagtagctgggactacaggtgcccgccaccacacctggctaatttttttttgtatttttagtagggacggagtattccctctcttgactgatgtttcagcagtatgtggacagattcttttttaaggtaaatgaccaggggcttgtaatatgagtgtcacttaggcaacaggacatttcaatgaaatggtgatggaaataggttctttttgtagattgtgagctcttgggagcatggattttgctaaatatactgatttttaaatttttttgacatctagcatggtgcatttcacataggagtttttcaagaagtactcatttcacaggcatcttgaatgatagatgtttggtaagaactgcgcaagacagtgtactaatcactcattctcattcagcctctcaagctatcatggttggttagtaataacatttcaaaattatatttgtcccttaggctagcagagaatactgtttaacaggtttttcttgaaaagtaggagtagcgagctagagttgtctctaggtggggtaaataaaacatctcccaccccacccaaattgaagctgaataccttcaattcactactgtgcgcatattcatgtttcatgctgagcagttcacttgagactttctcacggaaagaagtgcgatacagttggtggtagtcttatatttgctacgtgctcatgtgttgtctgatgatagaatgcagtggtcaaatattgcacaatttacgccagaggaggagaattcccatcaactctccaaccatcataaatactttattccacacaataaggaaattgaacttttcagaagaatgatatagaacatctaaaataggttaaacttggaggaattatactgtccattgtaaaattggagccactcttgaaaaattgctgcatgccccactgaatgctagagcaagacatgcagtcccagctccaggggcttccagagtgattgaggcagggctgtgggctgctttcctgaagcctgactcctttctttcctcattacactgccacagatggtggcagatacagcatggattggcataagtcactctctactacctgcagaataaaggcccaatttcctagtgcagcttgcaaagtccttctcatctgccaccttcctgcctttgtgatttctcctcctgggactcctgcacccccttttttttttttaatttttcttttcttttttttgagatagggtctccatctgttgcccaggctggagtgtggtggcgcgatcatagcttattgcaggcttgacctcctgggctcatatgatcctcttgccacagcctcccagatagctgggaccacaggcacatgccaccccgcctggctaattttttgtatttttttatagagacgggatttctccatgttgcccaggctggtctcgagctcccgggctcaagcgatctgcccgcctcagcctcctacagtgttgggattacagacgtgagccactgcacccagccactcctgcacccttaccttttcgccgccctggccggctggacgactgcacccatttcacccggcattcttgtgcctgactgtgctctggccatttcctgtgtctggaatacccccattctcccatgctcagccccgtggactgtgtttattcgtaatcacacctcagagcccttccccttctccatggactccacccctgctgtgtagatggccccaacatcattttgctgagtggagtgccactgcaaggcatggcatggaggagcctgactgcataggtggcggcaccttgagggccttacagacctggcagttgaaggtatgggctagaagacagatgattccaaattacggctaagaaataggtaggctgtaaggcttgattgccgtgaatgcctctagaaagagcacttaaaaaaaaaaaaaaaaaagaagggatttccctgttcatggcctatgagtttaaaaacaagcaccccatgtcattagccctttgctcaccacagagttgctgacacattagacgatctagatatgtgtctgagattttggatgcctattgattgtgtattcacttagactttggtgcttttctagatgtttcacaagttaagatgttgttaagaggttctcattgttttattcctatgttctttccttccactcccaactcactccgatgtcactcatctgggttcttctgctcctgcctgggctgcttagtatttattgagctacacactgtgcttggcacccagggccatggaggcaggcaaagaggggggacatttattcagcagcttcttactgagggtatgggtgccaggtgctcgctctgggaaggtgcaaatgaaatggatgatggctgagcctgaagaattcccagggtgaacagatggggggaagccagttcgggcagagggagtggcaaaagctgctgcttaaagtcgttgctcccaccgcgtggggagtaattggatctgtctgcagcactgaggcctggacaggaagatgggactggaatgcagaggggccttgcagggctcagtcggggccaaagggcagagaggcagggcacagagagaagctgtggccgccttggttggtcccatggaatcctcgcccattggggccatgggcattgatcgacactgtggagcttgaaatctcaccaggtggaaacatctctgccagccctgtaatcatttccatagtttcttctggttcttttcatgaacattttccaatatttttatttgagcattaataaaaggtttgcctatatacttaaatttctgccagaaagctttgacttccgtgatctagagcaagcttgtgcaaccacaagcaggtcacatgcagcccaagatggccttgaatgtgacccaacacaaattcgtaagcattcttaaaacattatgagccttttgtgtgatttttttttttttaaactcatcagctgtcattggtgttagtgtattttatgtgtggcccaagacaattcttcttcttccagtgtggcccagggaagccaaaagattggacacccctgatttagagttttaggacttaggttttgggaatgccaaatgtttacatggaaaggctcatccattaggatgagcatggttttcctcatgaactccttggtagaacctaatgttagtgtgtggctcttttcctttattattttcttctgtacagggtactttataaccaatagctgtttctgaaaatatgggaaaactatttttgaatattgaatcaattacattttcagggtagtttgataaaaggcattctgtggtcatctttatctaaaacgaatcctcctggccttagtgtgattattttattttatttattttattttattttattttattttattttattttattttattttattttattttattttattttatttatttgacagagtcttgctctgtcacccaggctggagcgcagtggcgcagtcttggctcgctgcaacctgcacctcccagattcaagcaattctcctgcctcagcctcccgagtagctgggattacaggcatgcaccacaatgcctggctaatttttgtatttttagtagagatggggttttgccatgttggccaggctgatcttgaccttagatgatccacccaccttagcctcccaaagtgctgggattacaggcatgagccaccccacctggccttagtgtgattttgtattttatgttgtgagttttgttttaaaaaaagaacatcagtaagttcagaaaccaactccatgcttatttgctgtaatgaatttttcccttacattggaaaaacacagttccatctgtcctgaaggcccataagtcacagaatgcggtgtgttggaatgtgaaatcctttcagccttgcagaatctttatcattgtgctaaattgccatgtggaagaatggcaggtggcagttagaacttagggctttctatttattctctttctattttgcattagtcagttaaggttctgatcttcagaactttgtatgaaagtcagtgcttcatacaatttcacatcaaactgtggcattgcaagaggcaaaccatttggaattcttccttaaattacaaaaagaaaaaaaaaagtgaatgcacgaagattgttttgttcgcaagacttatgacacagccctccagctctgtggcttttcattctgatgggaaggaaatgagaccattgtaaatgactgttcagaatattagtgccagctccatgccaagtgctgttaagaacatggagagagcattcgagtgtttgcctctgaatttttgcccaggccatagttcgcagttggccggcaggctgcaagggccattccaagtgggagaagcattccatccctgggacaagtaaacagaacctaaaacaaacacatgtttagttgaagtgatacagcaccaggcaaagtgttctacttttaatgagtgaaggacatcagaaacaaaggatcagagccccccacgttgcattctcaactaattatagcactaaggcaggaatccttggccctttatctggagtgagtcagagagtatatcatgccttatctaaagtctaaagttaattgagcccaaggcccttctgaatagacacacactgtaatcagatatacagatggagtgggaagaggtaaatggtttcagatgccagcctggtgtagttgcatgccggaggggacttaaaggaaacagtgagaagtattagaaaactgtagttgaccaggtatggtggcttatgcttataatcccagcactttgggagactcaggctggaggatcgcttgaacccaggagttcaagaccagcctggacaacatagctagaccccatctctacaaaaaataaaaaattagctggatgtggtagtgaacctatagtcccagcaacttgggaggcggatgtgggaggatcgcttgagcctgggaggtcaaggctacagtgagccatgatcacgccattgcactgcagcctgcgcgacagagtgagattctgtctcaaaatagcaacaaaaacaaaaaccaaaagtatagttgcagagaatggctttccctgcttagttttatccagatgactgttagaatagtggtgaagaatctgacaagtggcagaatgcagggccatgggaagggggagagttcatgcctaaggtcagctgagcagaggagacttggagaactgagaggggatccctctcctgtgtttgttgggagggacagagcctgttgcccagcctgcaggtgtgggagggaccctgcaagaagtccctttggtcaccctcttcaggccccacattgcctgatgaggttcagactcctaggcctatgaagggtaataaggcccgtctgttcctgcctttacttttcttctatcagtttctaagcactctcagcctccgggcctttgatcgtggagcgccatgatacagtggcgttgtcctgagtggttagaggtgtgaattctcgaggccgactgcctgggtttgaatccttgcttggccatcttccagctgtgtgaccactctatgcctcagtttcctcatccgtatgataggaatagtggcagtacctatttcatggtgttattgagctgtacagttgctagctgctgccatcatcattgtcatttcctcatttcttttagacccaaactctcacactttccggaattatttctggagccccccagaaggaattggtctcttttattctagattccctaagaggcacagagggatactagggtgagaagatagtggtggctcacagtcatcactctgtacttactagttttgaaaatgtatcaaattgctgacgtctctgagcaccagtttcccaatgtgttaaagaaggatggtgatacccaacccatgtcacagggtttcgtcagtaaatgctaaaccatgtggtaagcagatgttctcagtgagcaccaggtcactattattatgttacttgtcatgacgagttttacttgccaccttgtattatagttgtgatgactatcttttttctagctccacattgggacacatgaaattatagagttaaatgaactcatttgtagatacttgaaaattgtaataatctttgaatatctgtacctgtttgtgtccagattcttctggttattttgacttccttataccccagtgtccttttttttttggagacaagtttttttctcttgcacaggctgaagtgcagtggtgccgtcgtagctcactgcaaccctgaagtcctgggctcaagcaaatcccagtgccttataagcaggcttcctcaaggcctgttgtcttactcatctgtattttccttatagcatctaggtcagtgccttgcttataatgggcatttggcaaatgtttgttgaatgcatttatcattacttagtaataaatactaaactattttttaatgggaaaataggcaggtttgggttctcatgcacatgacccacatttgtcgaatgtctgctgtgtaccagccagcagctttcttcctttagtgctatttcctgttagagtgggatagtggtatttcagtccacctgatgaccatttaggccaatcacatgttaatgggaattgaatgcatgcattaaacacaacaccagcgggtgctgtccacattaaaaccaggaggtctgcttcattggttcttgactatattgaaagagttggaaatctgacctgggcatttgaggtagactctaaggggtgtaagacggccctttgttttagagacttaggattggtgtgagtgactggcagggactgctttagtgcccagacctttagtagcacagacacaatataggaaaactcttcaaggaaaaccagccccaaataagagagtaggtaatgttctgcttctcttgctttatattctgcttgctttacagaataatctgagatagctaataatcaaagtgcaggtcccccaaaatgaaagtgatcatcatagaaccagaaaagaagggataaaatactgatttcaaggactcctgaagccaatggcagctctgagtttcctggcagccaagacaaagacagaagcatgctgggatgatgcatcctcgggctcggtaaaggaagcacaggacctgcctgctgctgtgggctcagggaagtgagtactattttccctgtctggagtggggaggagcacttgtctgtggtagggtgaggaggaccacttccttgggctatcagtcattaaggccccttaacatcatggccgattctgaaattacctctgaaagttgagatttatgttagactgtagctctcaagccagttcccttagaggccagagtaatgacagtgtaatttacttgccacctgcttgagagagacaattggtggttaagggactttcccaaggtgataaattgttttagcaaacagatccagaggacagctcctttcccctggtctatgtatgccttttgaacgccaagaccttatcctaaactcaagtttcacgaataggattaaaataccctttggggacctttcttacattgagaacagaggctgggccacagcttggctaaagcattccagatctctcttctgagcaagagattttgacttgttcataaaccaggctctctctcatagtgggcaaggccttaaaaacaaacaaacctgcaaaacctgaggaaacatcttcctcctacgtacttagctgatgtaggcattaatggaaatggatattggagtgggaggctccttttagggggcagaaaagaaagaatgtttttatttttaattaaaaaaatattttcttttgagacagggtcttgctctgccatccaggctggagtgcagtggtgcgaatatggctcactgcagccttgacctccttgctcaagtgaccctctagccttggcctcccgagtagctgggatgacaggcgcacaccaccatgtctggctaatttttgtattttttgtagagatgaggtctcactggcttgcccaggctggtttcaaggtcctgggctcaagggatcctccctcctttgccttccaaagtgctgggattataggtgtgagccaccgtgcctggatgaaaaagaaataacttgattatgggttatggaagtttagcaatggcttcaaaaaatgtcagcagggaatggatgtctttttctatcagatgaaatttcagtagtcatctgatacagccaaccaggagaaggaaaactactaagtagaaagacttagataagtggagtcgaacatctctgggcttaaaaggagcatcactcctggcatattcagcgtggcccagctgtgtttctctgagggcgatgtcctcctcagggtctgtgaatggctgaactcagaacaaggcttttgcaatctgcgccttctgaatacagtttttgttctgttggtttaatttgcatttggtgtctggagtgcctggtcatggaaagagcccgttctttgttttgggtaatgagggctgaggtttccaataagtatttctcggttccgtccgtgtcgagtgtcatttgagtagcaagtgactgttgctcattgcactgggcctgcgagcctccatttgcacattagatttttgcataccctgcaattagtaaattacagaatgacatcatgaaatagaaaactgtattcccagatggaaatgctttccgtattctatgcatttttattcaaaggcagatgcatttgtaaacctctttggatggttgttctgcctttgtcagttacttcatagcaaatgtcaactgtaaaccaagagagagaatgagccaggatggagaacttttttttgtttaattgtgtcatgttgggtgctttttggaaagtgggtgaattattcatgatgacatgaatgggggtattattttaaattagtatagaagcaaatggttcacaacccatttattaagaccctaatgttgatgtggctaccaagaagctttaccagcaagggccagtgtgttgccttccttggttggttagtttttctacatccacttaactcctagcctaattttatcttttttttcctctgtttttctttccctgaatgtttatttaagctctgataaatcattttgaattaaggtcgggtatgtatttcctttcttctcatcttcttccccctccatgactgcctgcatttgaatacatttccattgtgtgagaggcagtaatggtacagaggggtggggggtggtgactgcttggtgagctgtggctcacatgtctccagagacacagggcctaggaagactgattaaaaatcaacttttaactactataacggctcactttcctgaaacttgttatgctgtaaccccacctattgaagacataatcagaaccagaaagtgaacaaaattgaccctggaaatatgtggcaaaaattctgtgcaataagtatgataacacttttctttcagtgaattctctctcagggcccactcacagaaccaattttgacatcaaattttcttccttttaaaaatacagttaacccccacccccatctgcaggttctccctctgcagattcaaccaactgcagattgaagatattcagaaatttagaaaaatgaaaaataacaatataacaaaaagtaatgcaaataacgcagtatcacatctatttatgtagcacttgtgttgtattaggtattatatgtaatctagagatgatttaaagtatatgagagggtgtgtgtaggttatatgcaaatcctataccattttatgtcagagacttgaggatctgtgaattttagtatcctcaggtgtcctggaactactccaccatcaatgctgagggacaactgtatataatataaaataaataaaatatgtactgtaaaattgtaatcttgaaagtttgatcctgtggcagctgctattttcaggcagctcagcctttgtttgcatgctcaaaaccagcttgtgatttggtttctaagatcacggctggcttattatctgtgctggcttatcatgacagtggctcggtgttatggacacagtgagcatttggtgtcgatactcccagaatgaactgagtagaatggacaggagactgacctttgtctatttgtctatgtagcagtaatgccactaacttgttgcagtgctctttatcctcaaactatttgctatatatagtaatgcttaaattacatatattatatatattacatatacatattatatatgtggatatattatatattataattatatataatatatataattatatattatatagatggttctgactttgcacagttctgatatgcatgagttgcaattaccatgatttaaataataccagttccccaacaactctagtcaaatctcagttacccccgtgtgttaattgagtaattgcatgaagtacacaagcttgctgctagtgcttcagtatacaactcaccatgtaaataacagatgcatgtcagaatccgtggccaatcacagcacttctttcaaagcccatgggtgattggtcagtgcacatgttccttagttcatgcacagacagcagagtgtgtagttctgtggccttcttggctattggggataaaccagtgtgacattttacaaaaataccaaaaatcgagagggaattggtgaacgaagataaaagtgcagcaaagaagctgaaagtgataatgctagaagtgaaaccaaaacctacatggaattatagaagaaatagctgactgtgggaatattggcagtacagctgttggagagactgcctgcgcagcccgaggaggagaatgcaggtttaccacataaacaaggaaagtggttgtgaagaaaagaataaagctgtcctagaggacatgaccttggcaaaacaaacaaatttcacattaaaggatctctcagaaccatttcccagcatagaaaatgcaaaggatgaaatgtatgcttattcaaacttacggctcctagcagcactgttcacaatagtggaaaggtagaaacagcccagttatccatcagtgggtgaatagattaacaaatggatgaatagattaaaaaacagattgtgatatatccacgcactggaatattgatttaaaaagggacgaagtactgatacctgctacaatgcggatgaacctgaaagataccatgctaagtgaaagaagccagatacaaaggtcacatatgataaggttctatttatatgaacgatcttggtaaatctgtagagaaagaacacagatttgtggtttggtttctaagatcacagcaagcttatctctaagatcggggctggggcgcggtagggaaatgaggaacaactgcttaatggatgtggagattccttctggggcgacagaaaatgttttgcaaccacgcggacgtggtggttgtatgacattgtgaatgtactaaatgcgcttaattgtttactttaaaatggtgatgttatatgaatttcacctcgattttaaaaacgtgacatttcaccaagtcatagaaaagatgcttcgcttgtataagttatgcgacaaaaagataagcacttttaaatatttcttgataagttttttgtttccagggttttaaatggcaacgtgctgaatatttcactatttttcacttccttgtacatttataactgacagtaatagagtttttaatgctttgacaaaatttttaagaagtcacagaacaattgcattttttccttttcatcactaacattgttttgcaccgtttcagcttctatggacattcttatggtttcatactgagtactgcctgtgcacatgtatttcactacacccccgccccccaaccaacccctccaccccccaaacacatcccatacccattacagcacgttgttgcagggaggattctgagatgcgtcttctacaatagaaaaagatgtgctgggcttgctgtgaaaaagcagaggaagttagaggtgggatattagtggtgaagttggtagaacctcagctgcttctagggaagagggaaggtaaagtcagcaggtattagggaccaggggaagcctgtaacttataaggtatggtaactatcagagcagtttgtgggattggctagcagctgtgtggccagtagctggaagaaccagtggtctggacatgtcctagttttgagaaatctgtcggcaaggagagcgctaggactgaaggtatgatgcctgaagcccagaaacgcataatgggctgtgacaatgctgtttcacttgagctcatcggatgctttcgaggattcaatccatatctccctgttctccctgcattttgacacaggccgtgcttgcatgacagttgggttagtgtattcccctctccaccagagacttgggagggtaggggagtgtgccttagtcattctcgagactcctgtgcctggcagtgcctagcaacggcttaataaatacttgctaatgaacctaattattatgacattaagattttaatctaaatcttctaaatgactatgggaatctgtttatttttgcttaggatcattggtaatgttttctggccaaagctgcttttttgtctgagctgtgtgtttatttttcattcctgtctcttatttatattgtgaaaatgattaagaaaaataggtggtatggctcatggtctgatatcacgagtcaatgtgttgttttgaagccaactccacacataatggttcaagccctctgactacatcttagttttactccagattttctccatcaatgttgcttgcatttttcagtggtactttttggaaggaaagaatacgaaagccagcccgcaaaagatcactgggtgggggtcatagtctgtgatggtgactgaattatctggtaaagcatatttttgccgttttcagggtcaggcttcagcataatgagattccagaaattgttatgaaaaaagaaaccttaggttacccagcagctaaatgattactgcatcagctagcagctccggaatggccatttggccctgtagaaagatcattcttgggcaggctgttgatgtggagagtgagaggagcagctgttctttcacctgaggccccatctgggtagcagatggtccccagctaggcacaagccctgtgtagggacatccgtgctgcccaggatcctgggacactgcccaaatcaactgtcaggctgggagcctgtgtccagaactgtggatggcattcactttgggttgtggaagttggtttgtacctactcttaagtcttgccccttcaactccagctcaggctttttaaccctagtagaagctttcttatctgtaggtatttaagataagtttgaacctactggtctgtgggaaggtaccgaaaaagccaaaagctgcagctcctggggagcttacaggctcccccttgttgagagtctcccgagtgctaggtactgtgggtttaagggagaccctgcagtggtcaaaaggctgcctggtgaaggggggccggttcccatacttctcagatgtgcctttgggcaagccacttgcctcctggtgcttctcttttgtcatctgttaaaggggttagtgaaggacccttctcatagggttgttatgaagattaaatgatttaaagtatgcagagtgctaagaacagtgcctggcagatgattaaaaaaattgttacagaaatacagtacaataacatttttggtcacatttaatcctcaaagcaatcatgcagaaagggcaattgtcatacctattttgcatgagagactcaaccactcgcccaaagtcacagtgctagaaaggacttgagccaggatctgaacctgtcccctgaaatcttcacctgctttgcttcttgacacggcaggagaatgatgaggaagtgggttagtctgctagggctgctgtaacaactgcagatggggtggccaaaacctcagacatttatttatttttttaatataatcttggatgttggaagtcgaagatcaaagtgttgacaggcatgggttcttctgagacatccctccttggcttgcaattggtcaccttcttgcttcttcacatggtcctccttctgtgtgtgactgtgtccaaatttcctttctgtaaggacacagccatattggattaggcccaccctattgacctcatcttaacttatttactcctttaaaaaccctgactccttatacagtcacactccgaggtactggggattaggatttcaatgtatgaattttggaggtgagaggacacaattcagccaataccagtaaatgattagtaatcaaacacagggattgaatacgcagatattaaggattggaatgaagccagaatttggaaggattagaactgatggaggcaggtgcttggtctgggtgatttttgaaaatgattttcaggccaggtgaggtggctgattcctgtaatcccagcacttttggaggccgaggctggcagatcacttgaggccaggagtttgagaccagtctgggtaacatggcaaaaccctgtctctacaaaaattacaaaatatcagccagaagtggtggcttgtgcctgtaggcccagctcctctggaggctgaggtgggaggatcactggagcctgggaagtcaagtctgcagtgagcaaagatctgtgcctctgcaccccaagctggacaacagagcaagaccctgtctccagaaaaaaaaaaaaaggctttcaacagagtcagtcgtggacaaagaggaaaggacttttttcctcccctgcagctttaacctcccaggctcatatgatcctcccattccggcctcccaagtaattgggactacaggtacgcatgccactatgcccagctaattttttttttgtatttttagtaaagatggggttttgccatcttgcttctgctggtcgtgaactcctgggctcaagcaatcctcctgccttagcctcccaaagtactgggattacaggcatgagccactgcacccagctggaaaggactttttgtgcggtgagaggaggatcctcagaatacggagatctggggtccgcagacccattgtgggatgcacattgatttagttagatcttgagtgaagagatactgtgttagctgactgcgtgataaacgttagcctgagaaattagtttgttattttgataggcatttgagtcatttattgaactaaaagctttggggtgcctcatgtactaggcacgaaatcacagtacagttcttatcaggggagagatcatttgggtctcagtttcctaaaagtagcttttaactccaaaattgttttaatctatgtttgtagaggaacatcatgaaaatattttgaaattaaacttcttaagtataccttaattttatactgttattattttatttcatttttatgtttattttttgagacaagtttcactgtgtcgcccaggctggagtgcagtggtgcgatctcagctcactgcaacctccgcctcctgggttcaagtgattctcgtgtctcagcctcccgagtagctgggattttaggcatccgccaccacgcccagctaatttttgtatttttagtagagacagggtttcatcatgttggccaggctggtctcaaactcctgagctcaggtgatccacccacctcggccccccaaagtgttgcgattacaggcatgagccaccgtgcccagcctactgttattattttaattagtaaattttggtataatagagactggattttgacttaaggctatctgggtttaaatcctggctctgtcacttaatagctttgtcagatataccatatgacataaataggcagagtttccatcttatcacctgtgaaaagtggataactgtacacatcacattggattgccacatgcagtaatggatgtggaggttctgtccagcattgtgtctttcccatgataggcacttgtgctaatgctatgcaagaaggtagaaagttgaaagtggatagctaaaagtggaggcaaattaagggacttcttaaaatatttttatttaatagaaaacaatatatagcaagaaaatttggatcaattctttcatgcattcaacaattgaagtctgagaaccagccgtgattaggtgctccaaattagaataaggcaaggctcctgccctcattgagcttccaggcaggcgggaagcccaggagggcgtgataagtgctacaattcaggtgtgttcaggttgtcatgcaggtattgaagagggctacttttggatttatgcccacagaagagtttcacagtttctgaatttttgccccaggatgggagcaggcacttgcattaacatttgaattaatcacccagagaagagtggaaaagttatttcaggcaatggtaacagcatgtgcagaagtctagagggatgggagaggccacatggcatggttggaaaatagcagctcaggaatccatttgctgtgggggtggtaagtggaggactagatttgtgaaaggggacagatcacacaggctttgggaacaactaggaggttttttttttgtttttttttttttttttgagacggagtctcactccatcacccaggctggagtgcagtggcatgatctcggctcactcaacctctgcctcctgggtacaagcaaccctcctgcctcagcctcccaagtagctgggattacaggtgccccccaccacacctggctaattttgtatttttagtagagacggggtttcgccatgttggccaggctggtctctaactcctgacctcgtgacccacctgccttggcctcccaaagtgctaggattacaggcatgagccaccaaacccggctgactaggagatttttaagcagggaagcaatttgatgatatttacagttttaggaagaccaaactgacagcagcttggaggctgatttggaaaggaggcagagtggaaggcagggttgttgaggggggatgttttagaaagattttgtgatgattctgctgagactgaggttctgaacttgggctgccctagggctgccctacagcagcccaggaggacagattgcagagctttgagatagttggcatcaagatgggtgtgtctggggtgggcatgactgggtttctagcttgggtgtccaagtggataaatagcctttcatgtggaggctgagggcatgggcaggttgagtactgtccttcttccccaaaggtagctggccagccatgggagtcaatccacatgggatggaaggatggagaatgccagctcctctttaaagacttggccctgaagaatagagcttgcaattttgtatctagggtagtcattaagatccgttcacacaggtttggatctttaatctccagaatagagggtgggatgctccctgctccattgagcccaggtcatcatgtgacaacctgtgactaattaggcagtgagctgatgagattcgtgtggctcttgagctaagcttttgaagccagggtgagactctctggccctcattatctcagctgtggtgcttggcatgtcccagaaggtagccgtgctgtggacctcagtccccgagggagcgctgtgccacctccacccacgatggacctgccctgagagagaagcctttgttttaggctctttaagatgacatggggattttggtggtgtttttctagcctaatctagcccttcctgactcaagtttttgtgtaagagaccaaaccttgctcattttcttttccttagctacaaatcagttttgaacttaccctttttcagtatatgcctgtgcatgtgtatgcctttgtgcgcaggcagacaaatatagctaggaccaaaagcatttctgctgttaccattatccttttgtccaaggtatttttcaatgaactaaatgtcagaaacacacacgctttcttaaaaaagcagctttattgagatatgattcacataccttacaattcacccatttacagtgtataattcaattacttttattatattcaacgttgtgcaaccatcattatgatgttaatttttttgtttgttcctcttgttgagacagagtctcactgtcgcccaggctggagtggagtggcacaatctcggcttactgcaacctctgcctcctgcgttcaagcaattctcctggctcagcctcccaggtagctaggactacaagctcatgccactacacccagctagtttttgtatttttagtagagacagggtttcatcatattggtcaggctggtcttgaactcctgacctcaggtgatccacctgccttggcctcccaaagtgctgggattacaggtgtgagccactgtgcctggctgatgttaatatttttattacccataaaaggaagcctgtacgatataaccatcaccccccagttctcccacacatccctctccccatccctaggcagcctctaaactactttgtatctctacattttgcctattctggacatttcatataaactgagtcatgccatgtatggttgtttgtgactggcttctttcaattagtggagtgttttccagggtcatcaatgttatagcaggtatcagcacttcattcctttttattggtcaaatactagtctgttgtatgggatacattgtgttataaaaccatatggtttctagagatggaagccatgctgacccctgtagagttttgtttatccatttatcagttgatgaacatttggattgtttctgctttttgcttctatgaacctctatgtagtacattcttgtacaggttttggatgaatatgttttcatttctcttgggtttatacctaggaatggaactgccagactgttttccaaagcagctcaccatttgacattcccccccagcagtgtctgagggttccagtgtatctgcatcctcaacaacacgtgttgtctgtccagtgatagccatcctactgggtgtccctgttgttttatgtcatttaacaccaaacttagatcacatttctgcattactgactttgcacataccgtccccaacttgcaacttatgctgtcattaacttgtgtagatttatccatgtttggctgtttatgaggatttgtccgtgtcaacatgtatgtttcataaggacattcttaccttccattaccagacctacattctcaatttaagatttgatattttttcagtgtttaggttttcaattgaatcaactgacaagtttagtggcttaaactttcaagcttaaactgaaatgccaatcttgttttagaccaaaaattacatcctatctcttctcttaattgaggaacttaggtggtggttcctatttgtctttatttatttatttatttatttatttatttatttatttatttatttttgcctacttcagtttggtcggtaaactatcaattgtattttcagtatgtatatatatatagagagagatttttaaaattttattattattttttgagacagagtctcactctgatgcctaggctggagtgcagtggtgtgatcttggttcactgcaacctccacctcctgggttcaagtgattctcttgcctctgcctcccaagtagctgggattacaggcatgtgccaccatgcccagctgattttttgtatttttagtagagatggggtttctccatgttggccaggctcatctcgagctcctgagcttaggtgatctgcctgccttggcctcccaaagtgctgggattacaggcatgagccaccatgcctggcccattatatatacatttttaatataatgtgaaatcatgtggtctctactatagactgaatatttgcatcctaaaccccaatgggatggtattaggaggtggggcctttgggacgtgattaggtcctgagggtagagccctcatgaatgggattagtgcccttataagaagaggccaagtgagcttgtttgctccttctaccatgtgaggatacagcaaagaacgtgctttctgtgaaccaggaagtggccctagtcagacactgaatttgccagcaccttgatcttggacttcccagcctccaaacctgtgagaaataagtttcggttatttataaaccacgcagtctgtgatagtttgttagaggaacccaaacttaaaggcagcttctaaaggggagcaatgctgaccactctgtagtttgtatatttggtcaacacactttattgagtgatgagtctgaatttcatgcttgattgatgatgattggtgacagagtagacaaggtccctgcttcatggagtctatggtctagttggggaaatatacctttattgaatcaaggcagatgtgattacagattgaacaatggctgtagaaggaaagggatttccaagagagaattagaggggcttctcaaattgagtttgactttctctttggtgggggttgagtcaggaagaacctttttgaagcaggaaaaatctttagctgagacctaaaggaaggggaggagcttgcctgggaaggacactgtggtggctggagggggtttcccaggcagggacactctggcaggttagagtaactgaaataaagtctgtattggagtgcagagactgccagaagaggggctcatagaggccaaagtgggacggccttacggacgagctgataatttgggcattattcaaggtggggtgctatgtcattgaagggttttagcagaggggaggcattatccaagttaaagaacaaaacaaaacaaaacaaaacccactctagttgctgtgtggcagatggattgggattgggggtgtggggttggtggcaagaatagatgcagggggacaagttatgaactgagactgggacctcatgggtcttcctgcccaagaccgagatggctgggggtgggggctgcggctagggacatggggcctcagtgcccacgttttctgtcctctgtcccctgtgagggtatgtgcgctctcataccagccgcagggcactttggctcgcttgtgttgctgggagagatctcctttaatgtttttttgtgtttttaaaatatgaacgtaggccctggcagagacaaggcagaaaccacttttgagtttttagggctgtgcattcttaaacaactctgagtgacccttccatcattacaatttatcaactaaattagaaaacgtgctttcacagatttctagtacttgggcaaatttgttatttacgctcaagatgaagtgttgcttctagtgacagttttgctgttgggcagcatttgtagggtaaaggtgtttttgcttttggaatccattgggagatttaaaaaaaatatatatatatatacacacacacacacacatacacacatataaagtaaaaagcaggaagtctatgtgtgtgccaggggatcccaaactcttggcctccagcagtcaagagattttttaaaacctttatcttttaccgtcttgctttttaaaatccattatgtctttgtatagtacttgacatacatgggcagaagtcatgctggaacgtgaagatgggagcatggactttctggagcatcccaggtggggttcctgtggctgctgtaaggcaggaccgcagagcggtggctgcagacagcacggatttgctattatatctcatagtcatagtcctgtagggtagagtctaacatgggctaaactcaaggtgtcgccagggctgtgttcctcccggaggctctaggagaggatccccttgcctttcccagtttctgcaggacatctagcagcctcagctcattgtcccctccctgcgtttgcaaagccagcagagtagcatctctgtggccattcccacatggtcacatctcctcctgggatgctctccttctgcctccctttgcactttcaggagcccttgtgattccattgtgtccatctggataatccaggataatctccctattttaaggtctgctgattagcaactttaattccatctgcagccttaatcccccttttctgtgtaagctgacctagtcacaggttctggggattaggactcgcgcatcttgggggaccgtcattccacctgcggcagtggtaggctaaaccttaggcgtctgatattgtgaacctggctcactggcctttgtcttcttgccgactcctattggtatttgcctgagatgtttttcttttctttttcattcttttttcttttctttctttctttcttttttttttttttttctggttctgggcccacagtaggtgccttagaatcatgcagtccagttgccttctgggaatccattgtagtaagtggtagaggtttttaaagcagtcctaggggagatgcaattccctgcttacattcaagtttttcgggaagacaagtctgtttaggaaacataggaggttagttgcattttcctcattaatgcaggatattaaaatattcagagggaacccaggagtcctctcaagatgagtttaaatttctcatacttgtagaagttgttgagaaatactggattctaatttccagaactctggtggggaaggagactgtgaacctggtctgaattgagaatggggattgaggatttttggacttttgaaagattgacttactctctcccgttagttctgttgaactgctgcctaaatggagggaatgtgcatcctctcttgtgttgcgtggcaatgccgtggggacacttgggacatgagcaaaacgttgacagaggggagcacttcccggaatattattaatacagagttagttttaacttcaccttttgggcaaacttgacattatagatcttgaaataggattatttttcccttgctaagaggttagcaaaatcagtacagtgtgtctctttgacaggccctagaaagcactctacgtttgttaactttaaatttgggttggaaattgatgttattggaggagcaaggcgtgtttaggcctgatgatttttggatagcttgaccaaacccggtacagccaactttcccccaaaactactgtgtccttctcagtggttcctgtgcctgcacagggacccagcgcacaccccagtgtgcctctttgggctctggctaacttaggctgacatcctgatagaacgcagtgaccacctggtcatttgattacagcgcttcttccagacagcacgctcagaattgcgtttcttacttccagtcttcttgccctgtaagcattttctgtgagtcaccaaatcaaccacaaaatcatttaattttatggaagtggaaaatcagacttattaaaatactgtgtttttgttttaaagctcagaggtatagagatccatgaatttttttccatgccttctcataatgtggttttggtttagctgcggttcttccaggcgcagatgtcagccctctgcagatctgctgcatcagagtttatggcctgggtcttaggaatttgcaatttaaaataaccccttcaggtgcatctaatgcagcctaaatttggggccagctcatgggttgtaaactgtactgccctatacaatagtagcacagttctaagctcaagggactcaagggggtccagtaagtacagttcaccagagaaataacaaaagcatttgcagagggagaccagagcatcacctttgttagggcaaaggcttaacatagaggaatgtggcttctatgtccaggccagtgggcttcctaacacagaacatggaattaggcagacttaacatcccccatgcccaccctggtgagtgccagcatgggcttgagctgctcttcacactgatggtccatcctttggactgatctccttgtgaaggatacaatacagcaaggagcgggggcttggcttggcacagccagttctttacccaaactcctgccaacgctggcccttctttcttaccctggttggagtgtgtgagggtgggagaggcaggaggaatatgctggacagagcttcttccatctagaagggaatttcaggagtaagaaagcggcagctcttaacatacctgggagaaagcaagtgcttagtaaacagttgaggaatgaactaagaattttcagacagattttcctcttctggagcatttgcagaaccgcctctttgctcaagtgctttgttttttacagattcatttaaggtcatggttccagacactaatgtaaatcagcacatatattattgaagaagtagaatacctccaggcccagttgccttggagcaggaaaaacagttcatcctcattaccatccagaataatttatgttcaagataatacacaatcaatttactttttatcatattcgaatttgatttgtgtacacttttgagtttggatgtcagccacattgcttctgtgtgttaatctttatttacgggaataaatgggaagcagtcagccattttttattctttattggggaactgcattatagtggaaaaggtaaaattataagctaatgagaccagaggtctgtatgtatgaaaaccatcctcatcgcttcacagttgtctttgaaccagtttccctgggattgttcgaaatgtagcaaacgtggctcacggttaccctgacggggccagagcaatagggggaggtgtgggcacctgtatacatttgcgttgaaaaacgtacccgggctattctgaggtcctttcctgcccccagcctggtttctgggcctctctggagtctctctttctggcacttgtgttctggaatcgcttatcagcctggactccttcagcagcagctgccacagtgtctttgtagtcacactacacacctatatactccatgacatggagtgtatagaatgtttcccgtcttcctcgtcagtgctgccaggagaagcttcccctctcctaacctctggatagtggctggctctgctttattcaggcattgctttcattttttagaacagctgctccagtatgcttagtgtgaatgacagcccagcagaaagaatggacttgacactggagactgcaccactccacatttctttgtcccctcaagatgacttaactagctcccttcccttttccttcatgcaatagcctcagaagttcggctggcattgccaagttgttagagtgaaccttaacctgtgtatgactcagaattcacatctgctgtgtcagtgaacacacagatctctttgtgaacacatggttatcaagaggcacatgctcttacgtatcctgccggattctggtaaggcgctgcttgcgcagtaagcacttgtcaggtgcttatgatgcctgtgacgtgaggctgtggatgcagaatttgtggtctgaacatttttgagtagataaaaatggaaactgaaattggtgaagcagacttgtggcttttcctactttctcatctcttttatggatataactagaagctctgcttcatcaatgagtgtgttaaaacaatttgtttacaaaatcctatttattaaaataaaaatctgaaagaactgcgctgctgcttttcagtgctcgccactctaggaacctgtattcctcctcttgttcatcctcccttttcttcttttttgttttgttgttgtttgtgtgtatgtatgtgtctgtgtgtgtgtggcggggtggtgggggcggtgttgccaaatcttttgcactgaatctttgaagatgtcctgaaatacttaccaaatcactagagcgaagagaagcccatctgatttcttcatctcccagctgaggaaggacacactttctcccactctccagtgaaggcccctgtgtcctgtgggtgggggagctgacatcacactcagtgctgacatttcttgttccctgggtgggcgctgattccagatcctcttcagccccccaagcggaactgggtttctcttgaaggtcctaacctcagctcacaccacctgctactacctttctgggtcttggattttgttgttacccaggcccggggtcatcccaaaggctcttgatagccctgtggctgtgcttgctaatacactgtcctcatcttttgtcagcgaagtaaatccaataatgtttccttctctttaatccaagccagtcttcattgaaaacacttcacctctaagctctcaggctctgcagtctgccctctccaaccttacccctcatgccccaccttccctttgtccccatctttcccttctgttccagtcattctcatgggccatggagagtggaagcctgggagggctttgccaaagtccagttgcctgctcactttcctaagggccagagcaatgggggaggtgggggaggtgtgggcacctgtatacatttgtgttgaaaaaggtacccaggctattctgaggtccttttctgcccccagcctggtttctgggcctccctggagtctctctttctggcatttgtgttctggaatcgcttatcagcctggactccttcatcagcagctgccacagtgtctttgcagtcacactacacacctttaccccgatccactgacctgctgtcccggatggccctggtgtgttctctctgttcctagccgcagaaattgctggtgaatgtcaccaagctaagcggtgtagctttataacaagtggattcagccagctgggactggacgactgagagtttgcagcccctgctggaccctgtgtaactgtccagttcgcctagctattggtttggcccagtggttttcaattttggctgcacatcagaatcacctgggggaggtttaaaaccctacctctgcccccatgccctggggttcacacccagaaatgctgacttcattggtcgggggctggcaggcctggacattggcggtttgcttagaagctgcccgggtggttctcatagcagccagggtcaagcaccacggcctgttcttacctggctccccaggccccctttaatctccctctgcagcagattggcacacatcgcattgtggagcaagccatctgataattttccttaatcgtctttgaagatcttccctctgcctgttgatcctttaaggaagaagtctccttgccaggatcggcctctccagtctctggatcccttcttgcttgctctcttcagaacccatgaaacctctctggctgccttgacgtcagccagattggactgcccaaatagaaaggcagaaatccctgtcgaggccagacagcaaggatggagaggggcagggggtgaaatgaaacgcaccaggaggagtaaagacaaggccttctgatgtcagccaagagcaggtgtggattaggcagtcctaagtttgagtcctggttctgctattcattggccaattgtattctccctccctctacgatgaggttaattacagttacctcactgggatttgtgaggatggaatgaggtaacaaaacataaaatactatcagtacaatgcccagctcataatgagtatgcagcaaatgttcaccctttaaaaaatgccacggccgggcgtggtggctcgcgcctgtaatcccagcacgttgggaggctgaggcgggcggatcacgaggtcaggagatcgagaccatcctggctaacacagtgaaaccccgtctctactaaaaatacaaaaaaattagccaggcgtggtggcgggagcctgtagtcccagctactcgggaggttgaggcaggagaatggcatgaacctgggaggcggagcttgcggtgagccgagatcacgccactgcactccaacctgggtgacagagcaagactccatctcaaaaaaaagaaaaaaagtccctttctaccttcaaattcaggaaaattttctttagtccaacagatgtaatccccccctcactcccccatccccactggtatctttatgtactcaggtgactattaccatattctgcttggactgtttttatacattgcagataatttgaagatatggacttaggtaggtttttagatttataataattaagtgatgtttttctatcaagtgatgaaagtttcaacagatatttgttaaaatttaatttagccaaaggaagacatgccatttcagcaatgtgatctaagtaaaagtgtcttctcttttttttggtggggagaacagagtgtagaatgatattagtaagatagagaattgatgaccaaaccataactgctagcattttagtagaggacacaacagagaaaggattctcacgtgtgttattaggatcttggatgagagtgggctgttattttaactttggcccctgttggagcaaattactctttgggggcccggttttcctcaggaactacctacagaattcagtgagatagattttagaacccttctgaatgctgctggtttggagattctgtctgtagcaagttttgttcagttgttaatctttctttcttttctttcattctttttttttttgacagggtctctctatcacccaggctggagcagtggtgtggccctggctcactgcaggctcaagcgctccttccacttcaactgcccaagtagttagaaccacaggcgagttccactacagctggctaattaacaaaaattttttttgtagagatgaggtctcactgtgttgcccaggctggtctcaaactcctgggctcaagtcatcatcctgtgttggctttcgaaagtgctgggattgcaggcatgagccaccacacctggccaactatatgttttctatgtttattatattttctgatttgtaatgtattttaaaattatcccaataatatatgaatgcaatcttgaaaaatactcagcatagcctttaggctaaaaagtggaggtctgccatttctctgccttgccccattcccttcccatgtcttattttccctgttaccaggttggtgtgaagcctttgagacctttttctctgcacacccatatatgtgttttttctatgtttttatagtattgtttcatttaaaaaataaactaggtttttgaacttgagaaatttcaactcgttctgctcagagctttgttttattaaaatcagtgcctgggagttgctcaagtctttgggctgtgtcgccctctagtggtagccctttggcttacagctgccattcagccctagggctggggtggaagtgatggttttgtgcccacaacctgatggcagggttggcagtgtttagttgctgacaagtgtctaaaactcaatctaggccgggtgctgtggctcacgcctgtaatcccagcactttgggaggccaaggcgggtggatcacctgaggtcaggagttcgagaccagtctggccaacacggtgaaaccccgtctctactaaaaatacaaaaattagccgggtgtggtggcgggcgcctgtaattccagctactcaggaggctgaggcaggagaatagcttgaacccaggaggaggttccagtgagccgaaattgcgccattgcactccagcctgggcaacaagagcaaaattctgtctaaaataaaataaaataaaataaaatataaaagtctagtgagccctggagtggtgtttgccttgctacctccaacttgccctttttaagagacttaaaatttgtggtaacttttcacatgatgtgtatttagatactgctgagttaatgaggctgctatacctggctgatttattgtttgctttcaaagcagttgtcaagtggtgtccacccatcccactgatggattttttttcttttttctttttcttttttttttgagacagagtcttgctctgttgcccagactggagtgcaatggcatgatctcggctcactgcagtgtctgcctcccaagttcaagcaattctcctgcctcagccccctgagtagggattacaggtgtgtgccaccacgcctggctcatttttgtatttttagcagagatggagtttcaccatgatggccaggctagtctcgaactcctgacctcaagtgatccacccacttcagccccccagagtgctgggattacaggtgtgagccactgcacctggccccactgactgtttatatctgttatactgttcttgcctctgtgccttttgggttccctgtcatggcagcatccttacatcctccaccacctctgaatgttcccgcaccttctctttctaatggaagcctggctggcccttgaagacaccgccaaccctgctggtctcttcacagagtatccacccagcaacctggcctgtccattcttgacttcttctggtccagctgcctttctgtacctcattttagtgaccctttttagatctcgtccaggttagcctctagaaccctgatctcaggcaccccactctgcgatcttccgttcccagccttcccacttgaaatcgtcttggaaatcccgggctttgccaatctgtggacccaccaccttttcaccccctttccggtgccctcaggggactttgctgtagcctgaacctcatggtcccttcctgtaaacagccaaactgctttgtactccctgaggagacccccgccccggttggacaccccaccctggttaaacccactttcacaattattccaaaactgccagctggacttgcatctcttcagatcggctgtcatcactcattgtatcaggaatcttattacacttttgcagcagtttcatcggttcagagaaaactctttcataccttctgctcatcagttctccacacctcccatcattctcctagctgatgactttgctgcttgtctcattgaggaaagaagccgttcagtcagtgagaccccctgtctcgcctccacctttccacctgctgccgcggaggcttccccagctcctgtctcactcaggccccttgccactctcaaggcatcttcttcctgcttcccaaggatgtcactcctgcagttaaccctttttcctcctgcattattcgtttcttcctttcttccgcatccttccaaatagcgtaaaaacaggccttatgatgtttctctttaaaaatgtccttaccagtgccacgtccctcttggccactgcccctgttgtgcctcactccgtagaaagaagtgacctgtagagactatatcctgccctctccagcgcctgccttccgattgccccttccagtctagtaactgtgtccattccttctccaatgaccgggtgacaagctgtctcttctgagagtgccagagggtgttccctgggtgggaggccggatgtcagtgccagctgtgctgtcctgggtgagcctgtgagggaccacatctggtcagactcgtgcatggcctgccctcatcttcctccgcctgcggtgcctttgagagcattgactccactaagcccgatttctgtgtggcatgttgtctgttcctccccggcctcctcgatggctccttcttggtctccctctggctactcctctgcttctccgcctccaagtgctgctccaagtgccttctgtgctctgtctccatccagcccaaaccttccaacactctctgtaagtggaatctcaccttgaggctgccagcccagcctcctcacctctgtgctccatctttagagagtcacctctctgtctggcattcccacttgaggaccaagatgattctcaaccttaacgtggcccacatggagccactgctcttcctgcccagatctgccttcaccaccacatcctgcccactgtcactaaacggcaccagctcttacctggtttctcagtaaaaaaacaagtttatcatcttccctcacatactttattcaataataatcactaacatttattgagtgcttcctatgtgcctgacaccattctaagcatttgaagaagagtgtattaacctgcatgaggaaggctattaaaacctatgtaattaattaattaatggatggatgtgtggatgaatgaatggcagggtcttacactgtcacccaagctggagtgcagtggtccaatcatagctcactgcagcgtcagactcctgggttcaggcagtcctcccacctcacccttttgagtagctgggactacaggtgcttgccaccagctaatttattaaaaaacattttgagagatggggtttcatgatgttgccaaagctggtctcgaactcatggcctcaagcgatcctcccactttgacttatagattgtggggattagaggtgtgaggcatcgcgcctggcctgtaataacctatttgtgaatgagaaaggtcaggcacagagaagttaaataatttgctcacagaaatttcctgtgttgcagctgagatttaaatccaagcaatgtgtttctaagcctgggctcttaactgtaacactgtcctcttccccccaccaggagggtgtgtgtgtgtgtgtgtgtgtgtgtgtgtttctgaatctgaccagttgaggcaggctttcatgtcattctctctggccacccccttctttgttcacctccagtctttggaatagtcagagcgatgtgttcatggtagaaatgaaatcacatcaggtcctcagtggcccatcacatttagaactaaagcttacccttgcctcatgcctctgagcccttatatgatctcgagtcaccaccccactgccagcctctccactctcttctctgtgcctcatgcagcccaggaaatataatttggaccgcaaatgccagccacctatgtacggtaacttttctagtagtcacattaaaaagaaaacaggtgaaatgaattttaatgcattttagttaactcatgatatcaaaaatatttcaacatgtaatcagtattcacacaaagattaatcaagtatttaacagtcttttcttttgatccggggtcttggaagtttgacctaccacctctcaatttagccagccacatctccagtacttggcagctgtttgtggctacctcatggacagggcaggtcccgccacccgggcatccgtctgcctggcgcacgcaccaaacgggttccagtctggggaagttggcatctgctgttgttacttttggtcagaacgcccttcgcctgcatcctcacggggctgactccctttagccttgaaggggaccgttgctccgagaggcctgaacactccagctgcagctttctccccagtcattattgagatcaaattcacatctcttacaattcacgcatttaatgggtgatgcaatgcggtggcttttagtatattcacacacatgtgcagacatcaccatagccaattttagaaaattttcatcagctgaaagagaaaccttgtatcctttagctatgactttgtgattccctgttcccctgagcccctggagaaccctatctttctgtctctgtaggtgtgctgattctgaatattttgcataaacggaatcatactagggggtcttttgcttgggacccctttcacgtggcgtgtttccacggcccatcccgtgtgatagcatgcatcagtacttcattcctttttatggcagataatagcccattgtatggatataccacctgtttttttaaaaagtccattcatcaattcatgagcatttggtttgtttctactttttggtagaatgatgctgccatgaacacttgtgtgcaggtttttgtgtggacatagacttaggaatggaataaccatggagttacggtaactctacatttaagcatttgagaagctgctggcctgtttttcatctgcaccatttgcattcccaccagcatcaagtgggagctccagtctctccatatcctccccagcagtcggttacccttttctgttgcctctgtagcactttctaaacataaaattagcttatttctttgcaggtgtctattgcaccccccaggaatgtcagttccctgcagactctcactctgccttggcacccgcaccccagcacccaggggtgaggtgcctgcctgggcagccctgtcctcacctggggttgactgaccagagaacccttgcgattctctctctgggtttctgtctgcattcctttcgggataggtgagactggggtgacggctgctcgcggcttggtcaccttcttctctgcttacctgttcatgctctcttgcttttctctgatagcaaaccccgtctcctgtcatcctccctcctggcggaccagagctatactggcccataaaggagtgctggccacaccaggctagattccagttgagcttaaataaaacaaatagaaaggtcctccgtggtattagccatattgtaggtgctccgtagacacatgcggctagtggctgcccacaggacgctgcagatgtggacgtccccgtcatcacaggacgacattctgtgggcagcgctgtatttgtttacaaacacaattctttggctgtgtgaaggttcaggatgatacctttgccattatgattcatttattcatttcaggctggacacggtggcccacacctgtaatctccacactgggaggccgaggcgggaagatcgcttgaggccaggagtttgggaccagcctgggcaacatggcgaaacctcacctttatttaaaaaaaaaaaaatcggccgggtgcggtggctcacacctgtgatcccagcactttgggaggccgaggcaggcggatcacgaggtcaggagattgagaccatcctggcctaacacagtgaaaccccatctctactaaaaaataccaaaaattagctgggcgtggtggcaggtgcttgtagtcccagctactcaggaggctgaggcaggagaatggtgtgaacacgggaggcggagtttgcagtgagcggacatagtgccactgcactccagcctgggccacagagtgagactccgtctcaaaaaaaaaaaaaaaaaaagaatcaacatttatttatttattatttatttttttgagacagagtcctgctttgtcaccgaggctggcacgatcttggctcactgcaaaccccacctcccagttcaagtgattcttgtgcctcagcccagtgccaccatgcccggctaatttttttgttttgttttgttttgttttgctttgctttcctttgttttgttttgtttgagacagggtctcactctgtcgcccaggctggagtgcgatggcacgatctcggctcactgcaacctccacctcctgggttctagtgattctcctgcctcagcctcccaagtggctgggactacaggctcccgccactgcacccggctcatttttgtatttttagtagagatggggtttcaccacattggccaggctggtctctaactcctggcctcaggtgatccacccgcctcggcctcccagcgtgctcatttatttattttagcatcccttcttgtgcctggttgtaaagttcttcttatcccaggaaacttaataggtcaaagaaccctccccttgaggcagtttggatggggctggctgggaattggtatgtccagctgcccatatcgtggcctctgagtcaattatacaggcatctcggcaacttgaagttttgagtcccaaaacaacagattccatagcataaacagtgcaacgtaaatcctgtcccttgtccctcttccattggatacccttgtttatgttctctctggcaactgcctgtagcagggacggatgctggaaatcctggcggggccacgtcttctgtgctttgtaggcagctatggctggatggtgcttgctgtttctgtgtgtaaatgttgggatttttaaaagcccttccccgcttaatgcgttgtggttgagcagcacatttaaatgcctgaagtgtaagatgaagtctcttggatgtagagggcagtggtggtttttatttttcctggttgaacttggcctttggattgctgactgcgagctcacggtactgttaatgattttctacctacagtcacctgctgtgctgagcacatcaaatacagtgcggttagttccaagctatgaagcgcctgtcacgcatgtataacaggcagacctcattaggagggggccttgcataggggtcacattttccagcatttgttttcaaaatggaaatccagatcacgcatttgagattaaaataaaaaaagcggcctgtgctttatcattttctttaacttacatgcctgctggtccagcccagattgctgatagaggaagccctgagaaagttgcccagccagttgcccgtgcttcaagacacaaagggctgactgaggcatccgtgcctacccttggctgctgctgctcagcctgcttgcatctcgtctgttttcagttatcagtggtgtgagaaaaacacaacggtggattcagaaggagaaaccaagtcatctgcatttggcctcagtgtgtggactgtcctgaaatttgagtacagatgtgttcatgtcctgggattagataaaaagagaggaaacacacagtgaattcttatggtctgtcatttcagttggccatcttctgcccctctgttctggaagcttctccactaaaatagagcacccaacttggttttctacttgctttctggcccatcttgagttggaggaatcatgtgtttcagaactcttgctggtggtgggtgggagatcaacaaatgatttcattaagctgtgtgttcttaataaactttgggaagatttgtcgcagagaaactcagatagggaccttgtgatctcagcagtcatgggtttatcttgtccacacgcgtggcttcattgggatttggttggttgcgatccagcagaactgtggcggtgttgggctctgttggggtttggttgtgagcggaactgtggtgttgggctctgttggggtttggttgactgtgatctagtggaactgtggtggtgttgggctctgttggggtttggttgactgtgatctagtggaactgtggctgtgttgggctctggagtttggttgtgatctagtggaactgtggcggtgttgggctctgttggggtttggttgactgtgatctagtggaactgtggcggtgttgggctctgttggggtttggttgactgtgatctagttgaactgtggctatgttgggctctgttggaatatggctgtgatctagtggaactgtggcggtgttgggctctgttggggtttggttgactgtgatctagcggaactgtggctgtgttgggctctgttggaatttggctgtgatctagcggaactgtggcggtgttgggctctgttggggtttggttgactgtgatctagtggaactgtggctgtgttgggctctggagtttggttgtgatctagtggaactgtggcagtgttgggctctgttggggtttggttgtgagtggaactgtggtgtcgggctctgttggggtttggttgactgtgatctagcggaactgtggctgtgttgggctctgttggggtttggttgactgtgatctagcggaactgtggctgtgttgggctctgttggggtttggttgtgatctagcggaactgtggcggtgttgggctctgttggggtttggttgtgatctagcggaactgtggcggtgttgggctctgttggggtttggttgtgatctagcggaactgtggcggtgttgggctctgttggggtttggttgactgtgatctagcagaactgtggcggtgttgggctctgttggggtttggttgactgtgatctagcagaacagtggcggtgttgggctctgttggggtttggctgtgatctagtggaactgtggcagtgttgggctctggatttggttggttgtgatctagcggaactgtggcagtgttgggctctggatttggttggttgtgatctagcagaactgtggtagtgttggcctttgttgggatttggttggttgtgatctagtggaactgtggtggtgttgggctctgttggggtttggttgtgatctagcggaactgtggtggtgttgggctctgttggggtttggttgtgatctagcagaactgtggtggtgttgggctctgttggggtttggttgactgtgatctagcagaacagtggcggtgttgggctctgttggggtttggctgtgatctagtggaactgtggcagtgttgggctctggatttggttggttgtgatctagcggaactgtggcagtgttgggctctggatttggttggttgtgatctagcggaactgtggtagtgttggcctttgttgggatttggttggttgtgatctagcggaactgtggtggtgttgggctctgttggggtttggttgtgatctagtggaactgtggcggtgttgggctctgtgggtttggttgtgatctagcagaacagtggcggttttgggctctgttgggatttgcctctgatctagcagaactgtggtggtgttgggctctgttggggtttggttgtgatctagcggaactgtggtggtgttgggctctcttggggtttggttgtgatctagcagaactgtggtggtgttgggctctgttggggtttggctgtgatctagtggaactgtggtggtgttgggctctgttggggtttggttgtgatctagcagaactgtggcagttttgggctctgttggatttggttggttgtgatctagcggaactgtggcagtgttggcctttgttggaatttggttggttgtgatctagctgaactgtgatggtgttgagctctgttggggtttggttgtgatctagtggaactgtggcagtgttgggctctgttggggtttggttgtgatctagttgaactgtggtggtggatcccaggagctgctgctgcttgtgcgcttcaaagttggattttgtgtttttttgtgtgcagatgcttcttggaatcttgcgttgctgtatgcctgtatacctggaaagttgtgggaagaacagtttaggattttgaaccaattttctcaacaagtttgattatttcatttgagacatgttctgatgtaaatatattctgaaaaggtgagatcaaacatccactttttactctaaagcaggtccccttgctcctctctgctagtgcattctctttcctttacagctccttctcctttctgaagcaggaattaagctgaagtaactcagaaagtgccagcgttaaccccaggggacagaaaccacagacccagggctgagggattgagtttttaatttccattattctccatcagtgcgttcagtcttttgaacttaccctgactggtattatcacttgaaagttgttgttattgttgttttgatggtagtggtggtggttttttgccacccacaggagagaggggattagaagaaaaagaccaatggagtttccttgggattaattaaatgtggggctgccacacaggaatgggtccaagggctgctgtatttaaataacttacttattttgcagaggtgaatttaacctaacatgtactacagtgatggagtaaaccttttcctgtttggaatatcacaaaaggtacttcaataattgcggatcttcctttgaaccctcctattgtcagatggggtagtggtacagttccttgttccagaatgctcttagcaagttgattaatctgtcacataccccagtttcctcattcacaaggtggcataataataggacatagagttgccgtgaagtttaatgagttaatgaatgtatgatgcttggcaaatggtaggggctcaagccaaccctcgttgtcttactgagcttagtgggccttggacctgctgaggactttgaactgagcattccgtgttattctcttttttgtttttttaaggggatgagagtgtgtgtgatagagttcatgacaatattttgtttaagaaaattgtcaaaacaaagttcaaatgcaatggatggaaagtgatttttaacatgtagggtaactagagatttgagatcagacaaatcgattaggagatcaccaaacccaaacagagaatgtgagttaactcatacttaggagatgaatgctggctttgaagaccatagcgtgcattttcaaaccagatggagaggccacttttctctgcagatttcagttattcgtgatgttaaatgactcgtcttctcttacttgcctggcatgtggaactgagtaaattctgtcaaaagaactcactgaaggaatgtgtaacagctgggaattggatgtcttttcagatttgggagagcctgtgttttgactgtgatggaattcttatggtttaatatgcttaaatattactgtttaacattttgacgtttttgaggacagggataattaggagaatgcacttataagtttctatgccaactgtttccactgctcccctgtttacatggtcccagggtttatacagggctctctgtagccccacaatgaatcttgccccagtgagcgggctctcacctcccttctatagatgaggttggagctcagaagaacgtagagaaacttgtgcatagttattatgccagatttagcagctggaacaggactggaacctaaatcttttttctttagataatatgttctttgcattaatgagtttgtgggttttttgggaggcgagaaatatgtgtaaataagaagtaaaaatcctaaattgcaagttgattttttttcttaatatagtaatacgtataatgcagcaaacatatcatttcccctccatgcttgctagactggcttatgcacacatcatgatgataatgaaggagctaacatagcaagcactcactctgtgctcattcataaggtggcataataataggacacagagttgccatgaagtttagtgagttaatgaatgtatggggcttggcaaatggtagatgctcaagccagtcctagttgcctttctgagcttaggaatcatggaatcatgctctaaaaacttcatgagtatgagctcgcttcatcctcataacaactctaggagatagacgttactttatgtccattgtagggatgagagtgtgaggtatgaaaggaagtgagcttaatattctttatttttattttttatttttattttttgagatggagtcttgttcactggcccaggctggagtgcagaggcatgatcctggctcaccgcaacctccatctcctgggtttgagtgattctcctgcctcagcctcttgagtagctgggactacaggcgcgtgccacaatgcccagctattttttgtatttttagtagagacggggttttaccatgttggccaggctggtctcaaactcctggcctcaggtgatccatccgcctcgggctcccaaagtgctggcattacaggcatgagctaccgcacctggcctaatattcttaatttggctgtcggttgtcacccaaatcagttaaagcaattccatttcttaagtgaaaatcagaatttcttttcttttttccccttctattttttcttttaatcttttttcttttgtcttcaagcaattttcattttttttttttttttgatattcagggaacctgaggcgaatgaaggggaggaacctgggagctactgactgtgattacagtggatattcacaaaggaagacctttagtacagtgtgaagtagtgagggaaagggtgatggagtaggagggatttaagtaaaacctttcaggtttaaggtcaatggaaagcgaaggaacattctagaaggacattagattttccttagagtgacattagagtttctataattggactataccctttagtgcctcaaatcaagggtttcacattttctttttttttttggaattgcctgctcatgtatttccatctccttaaaggcaagggctggccgccttatttggctgatactagcctccatggcatcagcctgtccagtggaagtcctgaaacagtacacgatgaatggataaatgaatgaatgaatgaatgaaatgaatgagggaagaaatgaatattgtgcttccagaacgaggagagaagggacgatgatgtggcaaattggcccagcatcttaagatctgtattgactttagcctcatgtggtagtttaatgatactctctcttactcagggaatgtgccttttaagctgtggtctgtggtcaatgtgtgtgcacatctctgagagtcccggctgtgttgtgtttgtgatggctcccatatgtggtttgcctttgtatctgattgtaaattaaccttgacatgtaggtcacctgaccgtgtatggagagagaaaaatcactttcttcttctctacaagctatgtgagtgcagactgaagttccgagttgtgatctcaagcagtctgcagaaactaacctttggcatacttggccacagccgacttctttctagtaaattcccactggttcttggcttttcttgtagaattaacacatttgcaaagttttcttcattggtattcctggtacgtggactggaatattcttcatcccttgatttgtgggatcgttttgtctttgggccacacttgtcatgggaggaaagtcacagctagactgggtatggaaagaatggaagtgtgtctcctgcagggagagcccaggttattgagacagtcttggcccgtgtttcttgaagaagacgttgggttttgttttgctcattgatggccataccccttgtgtggttggccaggaagctgaacgcttgctcccccttgtggctaaatacaggtggttctgctggcaaacccagtggtcaattactgcatctactaaggattaagaagattataaatgtaaactcagcttgaaactttttgtggcttagaggtaaagcaagaaaataattaagataacaactcacatgctgagggtgtttcatgtgttattattgtggatgttaataacaattttggctctctgtgggaagccatttccttcacttaatcagttggcaaagaaagtacatcagggaagattgttcaccctgagccgagaaagtggagtttcaagtaagaaccctgctccgcatcctgccactgagttgagatcatctatttgatttagctactgataaagtgtttttaattacaaattgtctgcttgcttggggactgacacaaacacttgttttgttttcaaagtgccttctctccccagtgttgggtttggagtagagcaagagtaacacagaggttgcagtcagtgtcttccagcgattttcattttgtttgatatgcggggaacctgatgctgatgaaagggaggaacccaggagctactgactgtgactacagtggatattcacaaaagaaggacctcagtacagttccaagtagtgagaggttgatggattaggacagatttaagtaaaacttaacaggtttaaggtcaaagaaaagtgaagcaacattccagaaggacccagaaaagccgagcaagtcaggcactgagatcttgggattgagaggagttgctggttcagacccagcactgttctggaactttcttttgggtactctttttttgtttcatcgattcctttaaaaggtacaatccagaactgaacatgtcattccacaagtggcccaaccagtgttgtatacactgactggacaggttttgccactaaaatggaataatagtctggttttcctaattccaggaaaggaaaatcaaggaatagatacattttttaaaaaagcatttaaagaatttctcctgtagacattatcttaaacttttggtccctgccattgtatgtgtatcttgaatccaagggtaatacgatacgcagtctggcaaaagcagtcattttaaatgattgagcaatatttagtgactttcaaagagcagagagcacaacttggctaccatagaagctccaccatgatgggcgcagggtttcctctaggctggaagttgtgttctggttatcttgtgagagaaatgcatcctgtgtgatttatgtggattcatttattcttagaggaaatcagacaaaaaccatattgtaaggcccaacccatctaaaaagacaatagaaatgagttctgtgtgtttttcagcagggcctcatgggcaccactcgtaagtccagaatctcttccaagaacaggaagtttctggagggcagtggagaaggggagtgagggctcagctctgtgaggtcgaggtgggtgtgaggaccagcaccagtggggagtgggtttattagctgggaaaggccataaggatgaggaagagaagcttgtgtttgagaggataacagggaggaaaagtcgccgagcccagagtgtgtattcactgcctgtcctttggaggcagccgcttccacctcttttgactgattcttccaacttgtatcctccagtctccaaaacatgattgtggtgcagctgcttgaattttcaaacttgatttccattttagaagttaaggatttgtttttttttccaaccacataccctgtcgctaccacatcaaatacaggtctctcatactgttggtcagctccgttttccgtgttgacctctgatactctgtaaacactcttgacacgtaagctgggtggtttatataccaccattacttttcctgcccagctttgtctttttcttccttgtattttatttgtaaagattccccagctcgtccccagttgtgtcagcctcttttcagtgtgctcagacccattaggtataaggcctatccatgttcctgaggaagtctggcccagagccgtccaggtggtctgacctgggcagggccccgggtctgccatcacccagcccatgctctcctgccgccccactgaagacttccttcacctctcttggacgttagggtttctctttgatggctcctctctttttctgggtttctgatattttctggttgagtggtgctactttcttctaacctatttttatttcattaaataaataggattcactaaatggatttcatacccatgggttgtatgatttgcactttgaaaggcactgggctagatgaccactttgagtgatgctgaggcattgctgggtgacttccttctttccttcttccctcccctcctcctcttccctcccctcctcctcttccctcccctcctcctctttcctcccctcctcctctttcctcatgaagcatgtgcacaggtgcatccctgatgctttgatcaggtatggcctgaaagacaagccattttagttagtttttggatacattacgaagtaatgtgggaagtaagcatcttcacctgtccctcttccctccttggctgagggacagtgtcctagtcagttccatgtgctgtgacagagtaccataggctgggtggcttaaacaaaaaacacttaatgctcacagttttggaggctgggaagtccatgatcaaagtactggcatatctggtctggtggggacctgcttcctggtctgcagatggccgtcaccttgttatatccttacatgatgagagagagagaaagcaagctctgttgtgccttttataagagcactaatttcattcacaagggcgccatcctcatgacctgatcacctcgtaaaggctccaccttccaataccgccatcttggggattaggatttcaacacatgaattttagggggacgcaaacattcagtccctgacagggttaggcactgtgtggctggcaatcaccaggatgcctggagccctgccgggaccacgctggctcatttcagccaccctggatgaatcatccagcctaaggcccatgcctggacattctgggtcctcagtgccttgcctttattttacctgatataatccttcaaacgaaaatgcttgtacttatttttgatcacttaatatacttggccatttaacaatacagattaaacttgtgttattctgttagaaaactgagagattgttttctgtagtctttgactgcatgcatagtctagggctggacttgggaggagaggataatttggccacaataggattccttattatctgtctcttccctcccaacccctcccccgacccccgccccatacaggagaccctcagatacatttctgtcagtaccctcagttacatattttgggagacgtaatacttaatgaaccaaaactctgttttgctggcagggaaaaaaattgggctgatacaatcaagataatcctatcaactttaggattattaggaatgttgataatcctatcaacattctatcaactctgtaatcagaaaaatatatttaaaataatgcgtgtttgttaaaaataaccaaacaaaatacagaaaaaagcaaagtaaaaattgacaatcccctaactccagtgttggtagttagggacagaagaagggtggaggatgtcttttgtctgtgttacatgattacagcaaaagtcactcttcattctggtagagccatagaaatctggccgagcagaggcagctgtgcctgaggagcctgacttcgaatcagctgtgttcatctttgctaacctcccaaagggaggaagctcaggaaaccaccgtagaaccccctaaaaggggagggtggctacagctgagcaggtgggggcaggcaggagtggagagaggcgaggatgatgagtcaggcaggtgagatggaggctttgtaggttatgttaaggctcctagacttagcatttcaagcagggatgtgacctgatcagatttatattttgcttgcattgctgatggacattggttcagtgctcattgtactggaagggtcaagaatagaggcagggacccaaatttagggggcttcccagggaatccaggggagaggtgttgtggcctggactagatttggaacatccagaaggggactggagcaatgacatacctatacctagtcccagagggccccgatctagctaaggacagagcgtgcagtcttgcagctgctgggctgatgacatgctggggagtgtatacctgggaaattctggtacagagataaaggaaatgctcaagcctccacctatgaatttgcccggtgattaaaatcatacttcctaagctttatagaagccctctgtttgtcccacaaagggccactagcacaaggaaatacataatgtgttcccttgtcattttataaaaatgtagactggtgctgcctgctgtgaaaatgccagtcaggttgcttccttcatagtaatcagtggattcttttgtccatttctgagtggaggattagccctctgtttgccccacaaagggccaccagcacgaggaaatacatagtgtgtccccttgtcattttataaaaatgtagactggtgctgcctgctgtgaaaatgccaatcaggttgcttcctttatagtaatgagtggattcttttgtccatttctgagtggaggattcctttccataacgtggtgtatttgcagtgtttctctcagaggaggagtgcctttctggtgtcatctgtcctgttggtggcagagttctgctgctgaattaaacctttgtgtcggccttggccactcttatggctctgctggaggtaaagccagtggagtggccttgtggcatttgctccgagttgttgctcatttttctgagattatcagaggccttagagggaagcattgaggatttcattatgctccgataactatcacgttgtcaataatatggttctgataagagtgatgggggatggtggggttttgtgagttgacagacgtgggtttgagacccagctctccagtcagaagccagcgccaggcctgtttctcttctctgagttttagtgtcctcaggtggaggggaggataatattaataacaccttcctgatgtggctccactgggctggccacgccatgggcacccagcacggggtggctgccctggttcgtgttaaccatcagcagggttggagagctccctccttactggtgttggaggtcattacctggcgggggatgtggtagataaagcaccttttattgtccctacacaaggcaactatggggtaacacaatataagttattcagattagagaaaatatgaactcttgctacagtgttactgcagacaggcacatatggtttgttaggatgacatttaaaaaaagtcattttgagttacagaataaaatcaaacaaaattcctttaatcaccagggctgggatggaaataaggcaaaatgttgattcctttgaaagacaatttttgggttttttttgttttttttaaaaaaactttatgtgttgatggtttactctggtctagtcgttcctactcctattctgaaagcaggccttgaattcctgattgtgtacaggattgtgtacaaacaatcaggaattcatcattcatatgaagaagttctgtttttccctctagtgtcatgaatattttcatgtacgtatatgttatgtgactagtgttaagaatgcatgtattatatatgtgcatgcgtctcatttacattgaatgtagctaaaaggaatatttgaaaagtataccttgcctgtctccaatttctacatttcaagttaaaaatgggaaataatcttagaatccatgcctgtggttcataagcctggctcagctcttgcattcccagctactgtctgacgaaactcacaggagctgtgaaaacaacgctgttttgtgaaagccaagtaggagcttagggtcatggcaaacttcagagaaatgtaaaggagcaggcactgtgggttttgtctaccccacccccccgaccccactgccttccaaaatttctttcttttttttttttttttttttttttgagacagagtctcgctctgtcacccaggctggagtgcagtggcgtgatctggggtcactgcaagctccacctcctgggttcacgccattctcctgcctcagcctcccgagtagctgggactacaggcacccgccaccacgcccggctaattttttttttattttttgtagagacgggatttcactgtgttagcccgtacggtctcgatcttttgacatcgtgatccacctgcctcgacctcccaaagtgctgggattacaggcgtgaaccacaccgcgcccagccccaaaatttctaattgaattttaaccttccacttttaagttctgatcctgatttataaaaacctatgtaattttcttcagctttcagaaggaatgtcttgtatcttcctatgggggtgttgggggaactgatattgacagaggtcctctgacatttgatagcctggcaaatagggtcaaacatgttccagacctcagaggattgctgaggatagctttctacttaagctagataaaagaagttttgggaatcttaccttgcactctgttttgtagaaacaactgtgtttaatatatttctcattactggctgaatgacctgtatgtgttcaggagatctctctatttaccattttaatgccacatatttaatgagcattcaggcccagactgtgaagactctggaaatgagaattttgtttcctatctcctgtgctgtaacaaaagcagcttaaaaattgcagtgtatagacctcaccttttatcatttttttttcagatttttaaatattaatattaagggtctttatctcagatgtttgttgtttaccaggtcatcagtatctggacgctggcagggtccttagcaatggagggagggagagggggtccagcctgcatgattggatcagtgttgaacctgtcccacctgtggggaagaggcagcatgcggagcagacaggtgcctgctgcaggtcaggagagctggccccaagtcctgacttggagggaaatggtacatattaatatcctttagtgccaggtactggcgtagctagtttatatgcatcacttgagcccccttgcatcactggcatcacttcaagatagacaacaaggggaatgcacatcatatccctgttcactggcgttcactggtagggaaactgaggcttaataatgtgcccaggtacacacagctgataagtaaccctgcaccctcgatctcacagcatgacattggaatccacctcattagacagagctcagctgcctattctgtcaaaaatgttgagttgtatcagctgcagtgtctgtagtattcctagacatttctgtgattctcataagtatctttgaaagggggccatttagtttatttctgcatttctcccttatctgccgaaatgcccgcaggctctgggacaagctataaagctctccgtgttatgctgtgttgcaaacccagtgccagtaatgatgcagtgctatttaaagataagaaagcaagctcacagagggagagcgcagcaggatgtttatgttccagaagcataaacacatgacctgtgcccgtcccgtgttcttcgtccatgtccccagagaggccgtggatgggatggtgcaagaaacccatcaggaagcagaattaatccttcctgcgggtggtccctgtgaagaagacacagcggccggtggtgtgacagcccacagctgtcgaaggaagggagaagagagggaccgagggccagcaatagggttttacagctacgtgctaggttgtctcacatctaggaaagagaatgttcatattatatagaaatgggcattttccctgtggcctgatatgaggtatccagaatattcctttaggtattattaagtcataggtttctgttttgatagaaacagcaggtggttcagttagtatttttgttgttgtaatagtagcttagatctcttgtttttgttttctttggccaagacagaaaacattctgccacacacattacttcatgactctggttatatattgagagcagcattaaaaaaaaaaaaaagtccaatttagtccattaggccattcttgcattggtataaagaaacacctgagactaggtaatttataaagaaaagaagtttaattggttcttggctctgcacgctgtactggatgatacaggatgcatgatgctgacatctgctcggctactggggaggcctcaggaagcttctaatcatggtggaagatgaagggggagcaggcatctcacgtggccagagcaggagcaaggggttgggtcacacacttttaaacaaccagatctcatgagaactcaccattgccagaacagcaccaagccatgagggatccacccccatgacccaaacacttcccaccaagccccacctccaacaccggggattattgtcaacatgagatttcggggacaaacatccacactatgtcgtagccttaaggggatcttacctctttgaagcattgtagagttcagagagtaggacattttgtctactgtattttaaaatactaaatgttctgattatgaaagtcagtcctggaaaaaaaaaacaaacaaacctgaaaccatagatgaagataaggaacaaaataaaaattacccacagtctccctcgcgtgtaccgcacagttcatgttttagtgtgtctacacaccatttaatgcaggtggacagactcaggggcaggtgtgccttgctactgctatgtccacagcacctggcagagtccctggtacagcataactgctcagcagttgggtgctgagtaaatattaatacatgtgcatgtggtaccagtcagggcccaacagagggacctcatgcgaggagttgctccacaggtgtggaggatgaaagaacaagttggggcgaccctgagagagcccagagacaagctctgcaggaagcaggcaccaccactgggccaggtgacctgagcccaggagccaagaggatgccctccactgctgatactacctctgcagtgggacgacatcggaccccactgccgatgctgggacggtgcttcccctccccctgaggctctcctaccagggccccctctcatcaggccccagctggaagccaactggaaagggagtcggggaagtttcatttgtgggggtccaagtgccaagggacagacaagggaagggtggatttgcagctaagaagatagtaaataaccagactacgtgacagtctgaagaatcaaatctggaatcaaattctactctgctctaatgtaaccctgtattttactgtgaataatataccgtgggtatcttccttgcttgatagatacagctccacataatttttctcaatgaaacagattctggagtaggcaacgttttcctcttttgtaaaatacaccaaattgtgaggattgaatgagataatgtcaaagtattagtactttaccctagctgattgacagtatccagtgatagtgataataagggtaattactactctagccaattttatcaaacctatggatgtttaaggaattgggttttttttttttctcctttgatgaatactcctgtaaatacatcgttgcctgcttgtctgagtctttctgtgggtttttagaagtggattacttgcagcaaagtctcctctacttaaggctctttgtatattttgcctaattgtgctctagaaatacatcaatttccagtcctccttctctcagaccacctgtccctcacattttcaccagttctgggtcttgttattctttttactctttgtcagtcaggtgattgaaaaatatacatttttttttaaattggcatttattagtgagcttgaggatgtttttcacagtcatatggaaacagttctgcttcatgaacaagaccttggggccacatactggcttgttcacctggatgcattttctcagtctccctcagaatcatttttctccctgaaaaatgggattaaaagtattaatagtagtgcccatctcacagagtcattgcgaggattaaagagaggatgcatagacgtattgaatcagtgctgggttctggtagatgttcagctagccctagagattattagccatttgatgtgctgatcctcaggaaggtgggcgggagagacctagacgcagaaaaggagctctggagttgaggtttctagagatgaggtggtgcgtggtggcccagtccagcatggctctgggtgtgagcacaacataggcagatgtgtctggggctcagggagtcatttgtggattgagggtgctatgtgggtgtggaccacggtgatccaggatgatgcaggatttgggccggggaggaagatggcaacccaggttccatgccatctttaaagaggggatggttactagggtgtccagcgaccagccaagtggcctatagataataaggaggactcttcatgacatggaggctgaggtggaaagtcccagagtagggttcagccctggccctaaaaagtgccggagaacctgtagcctcctggaagctgtgctgtgtgcagagccaagcttcagtgtgacaaggaatggtgggagcaatttggagaagaatgaagacttggtgcagtggctagggaggcaggcagggtgaggatgtggaagggtgcagagctgctcaaggtcagcttcctgagcctgcggtgtggtcccttgctccacactcagaagggccctgtgtttgatttaatgctcttttcttgccatcttgaaattcttgatagtttttgaacaagggatccatgttttcattttgcgctgggcctggaaattacgttgctggtgctgaggggatgtgcagagcagaggtgggcagagaactgacgagaaggacacgtgggtaagggtgggatgagctggcctcaggactccgagcagagctcatgtaaaggtgtcgggcccaggatgcgttctcaggctggggtgggaggcctgatgatggcagatttctctggattacaaatagaatatgtagcagggtggttcatagctttgtgtgtctgtgtgtgcattggtaaatttttattttgaaactaaaattatttcaaaattagagaaaggctgtgagagtgcggttgagctggtgttggctctggaacagggtttcccaatgcaggcggcactggtaactatgtgccttgggtcattctttgttgtgggggctgtcctgtgccccatgggatgttccctgcacccctggcctctgccttctagatgctggggggcactttccctggtgtaatattaaaaaaaactctccacgttgccacatttggggggcagaatcaccccctccccgaattgagaagctatgttattggaacacagtgtcctgtattttgtctagcctctgctgcttagagctgcctgagcttggagaagatacttgttctctttccaaagcttcactgtccctttctgtacattgtcaggacggctgttaataccactgctctaaatgtgctcagttttgcataaacatcagctaatgttaaaattttaatctctgctaatataagaggcatcgaagtacacgcgagttcagtttgcatatggtgaggagggagacggcctcatatcgtatgtgtgtatttgccgattctatattttgaggttgattcctgttgtcttttgttcagttgtctcattctgttttcttttggggctttgaatgcccttttcatgcctgtgacctctctttactatgccttttcttctctgccagcaaatctcatccattcttccagggcaccttactgtcccccaaagccccagtgactgctctgtccacagggcttggtttctgtgctctggctctgcaatgcaatgcagaaggggctgggctcggaatggggttgctggtcaggccatgtgcccaggggaaggacacaggactcaaggagtccacccctctctcccccccttttttttttggtcactgaaatattttctttccaattctactagtcctgctagagctgccataacaaaatacccaattggtgacttcaacaacagaaattgattccacactgttcttttttttttttttctttttgagatggagtcttgctctgtctcccaggcaggaatgcagtggtgtgatcttggctcactgcaacctctgtttcccaggtttgagcagttctcctgcctcagcctcccgagtagctgggactacaggcacatgcactgtgtctggctactttttatattttttagtagagatggggtttcaccatgttggtcaggccggtctcgaactcctgacctcaagttatctgcctgcctcagcctcccaaagtgctgggattacagacgtgagccacttcgcctggccatgatcccgcacagttctgaaggccagaagccaagatcaggagaccagtggattgtttctcccgaggcctctgttcttggcttgcaggtggccccttgctgtgccctcacatggcctttgccctgcatacatccgaagccccagtgtctctctgtgtgtccaaatttcctcttcttagaaggatgccggtcatattggattagggcccacccgtgtgacctcattttaccttaataacctctttcaagtttctgtctccaaatacagtcacattccaggggctagagcctcaacatggaagttttggagggagacacacttctacccataacaccaatgtcatattaagctttatggaagaatagaccaatatgtggtgggttcaagaatcttttcttagaagaaaagtgaatctgtatatttgatactttatgatttccttatttgctctaagcagttggtaagaatctcagtgtcacttggctgaatgatacactactggtgcctccagacctatgaggagcctaatatttttgtcttggttgaaacaatgcaaatcctgggttttggagatgctcacagccagctgtctgattacgtaaactgaaagtggcagagaggaagcttttgcgtggggaaaacatgaaatatacaagggttcctttaaaacagagtgtacttctgaacatttactgaaggtggagggccctggacacctgatgttatcttatgtggcgttatctgggtcagatttcattgcatttcctgaagaggtaacttggcagtcctgggagaggctggaccttggtgtccaggtggcaggttcataagacacctgtgatttgatgtgagccagtcacagaggaagccatttccagagaggaacaaccgtgtagactgctttcctgggagtcaagttaaaacttctctcctgtgaccttgtcacccggcagtggaaagttacccttggctgcagccacgacttccgcatactcttcagaacttgctctgcccttgagttttccagctttcctttaatgcactaaacctttaatattgtattctcctaaatgagacgtctcgcatttgagcaggtaacactcggtaagactttgcttggtgggggaggaggttttaccttcctgtggcattctgaagctctccacatccacccatagtcatgattgtgttatatgacctcaagatgctggagctgttaattcatctttaacataattgacctgattacttctttcttgaaggattttgttcaaacctcagggtttatttaggaacaagtctaaccaggcctgattggttttcctaagtggagatacagctttgggaaacaaattaagaaaatgaatggattgaaaatgtaggaacaccgtgacagttgtgaatttttcttattgagggaaaaaatgggtatctgtgaatatttctcttacactatatagtgagaaatgacactctgctgtggatggtaatttatttctgtgtaattgcctgagtaaggctttctctgatattgaatactgagtagaactcttaggttatttttggaagaattatggattttctcttaggttttagaatattttttgtttgcctgttaagagaatttgatgaagatttcaatgtaattaaccaaataaaatggcattctgtatcctgggaagggacgatgtctttcagttctaaatcaatgcatcatttacctcctatctctcttgctggccgagccatcaatcctgtttttattaaatgttgttgttattgttttgagacggagtttcactcttgttgcctaggctggagtgcaatggcataatctcggcccactgcaacctccgcctcctgggttcaagcaattctcctgcctcagcctcctgagtagctgggactacaggcatgcgccaccacacctgactaattttagtagttacagggtttctccatgttggtcaggctggtctcgagctcccgacctcaggtgatccgcctgccttggcctcccaaagtgctgggattacaggcgtgagccactgcacccggccgttttttgataaattttaaacttctggtttgaaacttttgtttcctgtgcttaaaaggagacagttaaaagcactctgatttggactgacagaatgttttttagatgttagatagatctagctttgaatatttatttgcagagaagtagcagggaggactaggaatgactttttcttaggaggtgctatgcattccatcaggtgactgacccctttgtgagctgtagtggtcagtcccagcatggcccacacttgttggctgtcttagccatggtggctgtggttggcgggtacccagccaagggttttccatactgggggccttggtccagtgggggcgggtcgtaccatgacccccttctcctgtgatcttgcctcactggcccaggtaaattggtggacgtccttgactcctccacctccaaaaggactttgaactttggcactgttgggagtttaggctacacctcaaccaggcagagattgggatctaacctacttttaaaagccctctacagggaatttcataactttcctgagtgttaggttttggtgattaacagccttgactttttggagcccttcctttgccaaacatgcattcctcaggtgctcacttaaaatgattcttcacaatatgcctatagacgggtctgtctggtacagcatcctggagtggtgtcaagggaaagaaacatgctgcttctgccacagacggaccatgcatgggaagaaactatttgagaatggctctccaaggggctggtcggccttgtctgcccactccctctacctttctttgttctgtttctttctcttcagtgttggtccattttccttttttcactgttgcgtgttagcacatcattactcttatctccatatatttggatgtttcctgcattatggtgagcttcagtaggtcttggatgagttagttgttctcattccaaaatgtaaatttctggtgtttagtaggtgctcagtaaagcttgagaaagatgaaagtgagagcccagaactagtataaaaatacggataccaccatagcatggtaattaaaggggtgattgtgaagatgaggtagctgtgcctggatatgtgtgtgtgtgtgtgtgtgtgtgtgtgtgtgttggctggagaaggcttaccagtggtgctggacatgtcgggtagagtgttaatagtaacttaattgactgaatttggaaataatctatggggttagagagcaaggaggtagctgtgtaagaggatggggtcggtgaggtggggtggtgtgagcaatggagctcaagggctcaaggtgcaggcctggactgatggccactaggaccaccccaatggcttcagggtcaggacaggaagggaatgtgattattgcagcaggtagtagggcagtatgagtgtattattcatatatgtgtgatgaaatggagcatcaaataatatatcccataggatagaaaggcacagtgagtgagtttgggttaaaaattcgatgagataaagtggttgtacctcctatgaaaacaatttaatttcttattatgaaggcattactcatgttcttcagaaaaattaaaaaaaaaaactcagtcattatagacaattgtactcaagatgaaaacaccctgtactgtcgcaaccctgaagcacctctgttaatatgtgtgtgtcttctcacggggtgattcttgatcagagttactgaaacagcaaggcttgggaacaagaggcatgagagcaacactcaggacctgttcagttttctgcacagttccaggtgctcttccagcattgctggctccgagagagtcaaatattcagagcttgcaagctggggaggaaaggggttagggtggagataaagatctgggagatctacagatacggatcatctgcatttggaaattttgtttgcccttctcacacatttccatccaagttttctttggggaagaggggatccctgcagaggagtccagttgcaaatgtgaaatcttaaaaatgtatgtaaatagcatctttcattccgtgatacttgtttgtttgaatagaacattgttaaattttattgtgcttcagaatcatctgggtgcttacaaacatagattgctggactctggttctggagattcggattctggaagtctgaagtggggcttgggaatctccatttcttccaagttgccaggtgatgctgatgctggtagtcgggagtccgtactttgagaaccactcttctacctaccaagacttccaaaaaattggtactctgggaagatgccctgtgccagtcctgtggcttcttaggcacgtcttccagcatagactcctgcagagaacctggtacctgcaagtacctagtacctgcaagtacctgcaagtccagtgtgggaaatctcatgacaggcatcaacattccgtgacggttgacagccacctatggggtggctgatgccttttctgtgtcttcagggttttaggggaaggagagtctaaatgagtggttctaggttgtgggaagagcctggctttgatgttcagacacctggcctcaggctgcatcgcccatacttcctgtggaatggttatcatgagtcctgttgtcctgtaggtgaatcattgattcctgtctttgcataacctctcacttgatgataatttttttttaaaaaaatgactcttggaaacagaacacacagttgtagagggacctacagtacagcagaagctttgtggaaggatacaaaatgtgagggactgtagtcgaagagatttaaattggaagtgggaagagattgacttttttttttttttttttttttaaagacagagtcttgccctgtggtccaggctagagtgcagtggcacaatcttggctcactgcaacctccgcctcccaggttccagcggttctcctgcctcagcctcccgagtagctgggattacatgcatgagccaccaggcccagctaatttttctatttttagtagatatggggtttcaccatgttggccaggctggtctcgcaaactcctgacttcaggtgatctgctttgtgtctcttagggagcatgtttgaagagtcaaaggaaaaccaagtctgttagctttgcgaaacgtttttttttttgagatggagtctcgctctgtcccccaggctggagtgccgtggcgcaatctcggctcactgcaagctctgcctcatgggttcacgctgttctcctgactcagcctcctgagtagctgggagtacaggcgcccgccaccacgcctggcaagtttttctggaatttttagtagagacggggtttcaccatgttagccaggatggtctctatctcctgaccttgtgatctgccctacttggcctccaaaatgctgggattacaggcgtgagtcaccgcacccggcccgaaatattgttaaaaccaagtacctttgtgaaacattgttacaaaaaccaagtaccaagtgtgtggcattaaagtcaaacattaatttcaagttacagaaagaaatagcactgagtagaggttgatcgataaaaaatgaataaaatattcaacagaaactccttaaaaataatgtgagaaatggacatgtgacatgggcgtttaaaaagtctgtaaggccaagaaaagtttcctgaaaggaacactgtgcccaggcagtcctggctttgcaggattccctgataaccgagctcaggcatcctgcagagtgagtactgcccagatagaaccttctgcctctttggggtaaaattcgatttcaaagagagagaactgtggggtgagaaaggaagactgggacccaaggggccaaactagtgacaatgactgctgtcatgaagggtgacaaggacaatacctgctgagctcaaaccaccctttggacccagtgaagctcagatgttgcttccagtgcaggagtagttaagctcaactgttttacaatatccagttatttggctgggtgtgatggctcacacccacactcctagcactttgggaggccaaggtgggtggattgcctgagctcaggagttcgagaccagcctgggcaacatggcaaaaccccatctctactaaaaatacaaaaaattagccagacgtgatggcaggcgcctgtaatcccagctacttgggaggctgaggcacgagaatcgcttgaacccagggaggcggaggttgtagtgatccaagatcatgccgttgcactccagcctgagtgacaagagtgagacttcgtctctaaataaataaataagtagcaaaaacaatccagttattcctcaaatatttatgagcacctcttaatgtttcagatactattgtgacaagagaaaaatgtgtttgtatatgtaaatagaaaaacaaaagtgatgtggaagcgattacttctgtcattttggaactaccttcctcccatattaagtccatattatgacaattcaaaaataatcaaacttcgtaagatattacctgtgaaaggaataagtatttaaaaatgtattttagatggccttttagaaatctagtccatggacacaatctagcatcatgcagttgccttcaaaaagaatatcctaaagttcttgtttgttttctttttcctttcaaagtgttctgttgaaaataacccatttgtcattttagttttgatatgacttagttatacatgccttttgaagcagtacccacccacatagtaattgcgactatcttgtgttttgaaaaaaaaaaaagcgagacaatttgactttgatagttttaagtttaaaaaaaaaaaaaaacgctccaagttagactcagatgaaatcctttgatcttaggtattttatgaggaaactggaaaaaataatttcacaaatttctattttgctttataaaaattttatgattcataacacagggaaaatccagtaagctaaggcgttttttagtcgtttatcttgctagtgagtctttgatgtgagttatttctttgcagtaaggtggcatggatgggtgatgaggctaagctgaaaagttaaatctcataatggacatttgcaccctttaaggaagtaaagctctcaaagcatgattatggccaagatgaggccggtggcatgtttgtctcctaaatgtgcagccaggaatctcgacggtttgtctgaggtatgcaggtgcctggtagataaattagggtgagcatcattcatggcgtgtggtcagttgcaggccttcagccacagggatgacagaagggaagtgaggaatcagggatgggtttgaactgcggcgttgctttgggagtctctagacatgatcagttgcacatggactgttctccttgtcaccctcaggatctactgtcctgtggttgaagcctgcagctctcccaagttggtggcactgggcttcctgacttctcgatgtctaatgagacagtggaattctacttgcagccccactgcaggccaggtttatctctcctctgtcttcccagctggtgatttggtttctcagtgctgttttgggtgcacttttgtggaggattcaagctggtccttagccactccttgaaccagaacctcttttactttcttatgtagttcttctcttcctgtttttatatcctaaaactagtccagcgaccagcccatcgtagtagaagcgttggtgttcttcctaaaaggaattgtaaacatctcttggagagtgggttagccaccataaattgttttgggacttcggatacccccttccgcaaatgctatctagagatgctttaatttcatttcaattggttattgcatccctgatattttgaaactgttatgagtagaaaacattctggtttatgaacaatctgcttttcactatgaaatagatgggaattgtaattattcctgcgctttgtcttagagaagttacatgcatgcatcaagtgttgtgtgatcttgtgcagttcttcttagattgagtttttggctcctcgtgtgcaggccttctaaaatcacaatgtccctgagttgggaaggaacatcaggggctatctggttcattatcctaccccccaccgcctcccacgccccacatttctggcagcctacgagtctttggtccctccccagtgctacctggccagctctcagccttgggaggccacctgcccgtgtttgacctgggttaatgaccgccagttcctttcccttaatacgactcatctgctctcctgcatgctcgctccttgggtgagagctgccctctgcaacctcataacggaaaatggcttgacttctgccacctcctcctccttcccatgaaagaatctggtcttttctatctctctattatttttaaaaccagattaggttggttgtggtggctcacacctgtaaaaatcccagcaccttgggaggcagaggtgggcagatctcttgagccccaggagtttgagaccaacttgggcaacatggggaaatctctaccaaaaaaatacaggaaaaaaaaaaaaatagctgggtatggtagcacacacctgtagtcccagctacttgggaggctaaggtgggaggattgcttgagcctgggaggtcaaagctgcagtgagccttaatcactccagtgcactccagccggggcaacagctagaccttgtctcaaaaaaaaaaaaaaaaagaaaaataagaaaaagaaaccagattaaacattcctaagtaattctttttgtgacttttgcctgtttattaactatcctggctacttaaaatgaatttttgagttatgaatacatttagatggttttaaattcaaagaagtctcttttttctcagtcacttccatccccagccaaacagttcttatccccagagtcagccagtgttaccagtttcttgtgtccatgcagtttgctttatgcatttacgtaagcaaatattcgtacacacacacacaccctttctatcttatggaaagttatttcagtggcacatgtaagtatctcagcatctcttgattgtcattctttttggattttttttttaaatttcatacttacaaatgatcatgtatcttaagttttctgaagtagccttggtttcgcattttgactgtatttattatggtatcaggttccatatttcttaaaagtaatactgctgctgcacttacattgaacaagtcaccaagctctgttaattttgcctgaaaaatgccactgctttgacatgatagaaaacacaggcaatagtctttatttctcactgctgtttttttcttattttgaagaatcaccctaatacataggaaaatctcgacttagcaaagagataaatgagactgtaattattgcattgggtttttcacaatgtatgttagttatctattgctacataacaaattagttttagagttagcagcttataaagcaacagatatttattatctcacagtttctgtgggtcagtaaatcaaaagtggcttaactgggtggttctgacatgtgcctttccacagtgactggtatgtagcaggcaagggtctcttatgatcctgagtgaggatgtcagccaaggctgctgtcatctgaaggcttgactggaacagaaggacccatttctaaaatgagtcactcacatggctggaggcaagaggcctcagttccttatcgcagagattgctccttggggctgactgagtgtctgcacatcatagcaacagctggctttccccagagggaatgatccaaaagagaggtggaagcctaatgtctttgtgacctaatctccaaagtcacacactgtcacctcttccatattctattagaaaggagtcactaaatcagatacccatgggaaattacccacctcatgaagaaagaaatatcgagaatttgtggacctgtttcacaaccacacagcatcattttttgaaggtagagtcaccttgagcatttaaattagggttctgctctagaagtctatccctttattttttcccatttgttaaccctttttctacttggcataatagcagccattacccagtagaagttgagagatttaggttgcacagaatcccacagtcttttcagaaactcatatccttagggtgtctgcttgttgacagcattgtagaattgaaacttgaccacgtgttatgtgttgggctgccagtggtgatcagagatgacggtgagtagtccgttgagttagggctgtttgcctctgtcggtgtcatctgggtttgaactggacttgcagtcctggtgggctgctttcatttccaccctgggtctttgttctcaccactcacatcttacgcctctgttccaccgctgtgtaagaggcaactgtgcacacaccttgcctctgccattgactgtaagctcctgagagagagagagaatgtgtctggttcagttttgtggccctcctttttgctagcataatgcattgaacatagtatcattctgcatttttgttgagtgtataattagatggtcaatgtggagaactcagagggattttaggagggggtggcagcaatataaggttgtgggacccaacattaagagagggaaaggtgtagcgggaaggcgttggtgtggggagggagaaagtcaagaggattcaacctggcaagagttggaagtgacaggaaggtgtgtggggtggggacgcaataggacagtgtgtgagattttttaaaaaatgcaggcaggggagggatgagtaggcagagcaccgaggatttttaggacagtggaaatgctctgtatgatactataatgggggatacatgtcattatacatttgtccaaactcaaggagtgtacaacaccaagagtgagccctaaggtaaacgatgggcttcgggtgatttcgatgtgtgaattgtaacagggatactactctggagcaggatgttgatcatgggggaggctgtgagtgtgtcgcggtagggggtacgtaggaaatctccgtgccttctgctcaattttgctgtgaccctaaaactgctctaaaaagagtagtcttaaaaatgcatgaaataggatcctgtctcaggactggggcaagagcaggtagaaatggaaagagtgactgtggctgctgtgtagcaggcacacaatggtcatggtccatatgctggcttagttattttttaaagcaactaaagttaagtaatgtatacgtaacttacatatttatgtggtccaaaaaacgttggtcatctgttttaatgcagagagtgtttaccctaagcctgcaaatgtgatgggtaatagctagaactagaaaagtactttagaatatggaaggtaaatacatgaattaatttaggtaagagtgacaaaacagtggaagtccctgacttagaacttattgtccgcttggacagctggtgtacgtgatcctggggtcacagtggctccctgtgcaggaagaacactatttcccagctcagataccatctttttaggagagtacctgccattgtggaaaataaggataaaggataacaagttacctccttaagacaaagtcataggagaaatggtaaattccagtatcttgagttttgagttggaacttgaaatttattttactacaagaacactgttgatggattatgtattttatagactttgtgggtggctatgggactctagtaactgcttatgcacagtttatatgagtagggctgctggatttccagatgacgctctcgcaactgaaccttcagattaccacctgtttctcagtttggacactattagtgtgctgctgtcacttatggctcgggcaccttatcttgttttatgtcttgatgaagaagtacaaaattcagtgtaaaagaaaaacatatgtaaagcttatagaatcaccccgttacacaataacaatgcagaacaatagattaataacaggaagagatgctgaaacttctcttcagcctagtttctactctgatgtttcttctctgcattgtacagccaatctatgaataatattttcattgtctaagcaaagccaccttagctaaatatttaattctactggagtcataaacagggttcaaaatatcacacatagattttatgaaagtaataaaatgcttcagaaagtacagtggctcagcctggggccactgcatctgataatttggttacacaccttgtcatgtgcttcctaaaagaatgacgatggttgcttatctgtgtttaagcttgtcattttgaggaaacaaagataagacatttttgctgtgtctctaaaatgcatgtgtaaactatttttatagagtaatgcttcagagaggagtaaaatttcctgcaacaggtgcttgtaaacagtaattgctcagtaaaggtcacctcccagctgttgcctacatgttacataagagaaccccttcacgtcttccgtatttgcagctctgtacctttgtgagtcacctaaaaaataactcatagggttgtttttctttctttcttttttttttctttgagacagggtctcactctgtcgcccaggctggagtgcagtggtgcaatcccggctcactgcaacctccgcctcctgggttcaagcgattctcctgcctccattctcctgcctcagcctcctgagtagctgggactactggcatgcatcagcacgtccagctagttttatatttttagtagagacagggttttcaccatgttggtcaggctggtcttgaactcctgacctcaagtgatccacccatcttggcctcccaaagtgctgggattacaggcatgagccaccgtacccggcaggtttgtttttcttatgacaaaatcaagcctggatggtgtcgttaacggtgaagttaaaatttttcttttgctttccttaatatttccgtgtttttttctttttctttttttttttttttttaacaaaagtctggtttctaaaccaaaatatttaatgcttcaaaaggaaaaaaatgtaagtcagtccaaagaaatgattcattttgcagaggtaattactactaacatcaacctttccaggtctttttctatgcagctatatcattgacatttttttaaaaatgagattacattgtactggagggtagactgctataacaacttttggttttggatgggaataaacagaaaaagtctcatctccagttcatttctggggagggtcaggaggtggggggtgcttggctctactcccttcgtatgattttcccttctttatctccaggatcttccccatttcacggagagacatggatgagaatgaaggctgctgagtgggaggggcttatggggccagttttgaagaggcctcataccttttggccacattccattggccagaactttgtcatatgactgcacctaactacaaggaagactgggaaatgtagtcaagttgcatgtccgggtagaaaagggacacttttctgtggaatagctagcatgtttgtaactcaattttataaaccattttgaaacttttcttaaaaaaagcttatttcagacacatttttatatgctggatctgctcacctctccatctctatcttattaaaagttcttgccagaatctctctccaattgttctccctccttctgccctgttccctcacagcagccacagtggttctttcaaagactgaagctacattttatcactcgcctgcttaaaactttacagtgcttctcccccagtggtcgggataatgttcaccctctcctgaagctggcctctgtggtccttgaccccatcaggtcccacggtgccctgcatggactctgccatccttcaccagcttccccccatcaaacggggcttgctgtcagctcttcctgcaactcccagccctgccgcaccactcagccttcttccttcaggcttcagctccagtgtcttttcgccaaagaagcctttcctgatctctcagccataaatgttcctctccccagttgctttttccctctccctctactcagttgctttatttaactgtcatattgtctttggagcacttgccaccatcagaaattatcttgcattatgtatttatagtctgtcttccgcctactagatggtgggttgcttgaggcaggaactctgtcttgtttacatctctatctccagataacgtgtctggcacgtgatgggtactcagtaaatacttgtggaataaagaaatgtcattacaggttctctatgcattaaaattttttagaaatggggtgttgcagccgggcgcagtggctcacgcctgtaatcccagcactttgggagactgaggctggtgtatcacctgaggtcaggagttcaagaccagcctgggcaacatggtgaaaccccatctctactaaaaattcaaaaattagctgggcatggtggcacacacctgtaatctcagctacttgggaggctgacgcagaagaatcacttgaacctgggaggcagaggttgcagtgagctgagatcccgccactgcactccaccttgggtgatagagtaagactctgtctcaaaaaaaagaaaaaaaaaaaagaaatggggtgttgctatgttgcccaggctagagtgcagtagctttccacaggcttgatcgtagcgcactgcagccttgagctcctggactcaagtgatcctcctgcttcagcacctccccgagtaagtggtactataggtacttcaggttttgaagcatgtgtaaaaaatactctagcagggacatcatttgagctgagcaggccatggaggcatcaaatgattagcagtagggtacaacttgttgtgagaaccagaaaagagccttggcctacataacatcctgtgctaaagaaagaaccctgactcccagcctgtgagtgttccagagatgggcagagcagtccctgcagcgcttcagggaacagggaagagcagctaacccctgatgcttctgtaagcactttgggacgccctttgctatagtagggtattgtcttagttatccctgacttgcctggtgttactttacatcccttaatcctttcatgaagactggcaaacacattcagtcctgccaaccttgaaagtaggccatgtttgaaagaacattggcacaaacgagttgcgaacatcttctttaccatattcatgttctttaccgtattatgaggacactgtgcttgccacatgggcagtcttgttttggggatacgtggttggatggacggttgggtggatggaagactcctggaatgtgaagtatctcaaggatgtgtgtccattgcatgaatgtatgtttgatctatgcagctaattgacaaagatccaccatcctgtaccctccatgttttatttttgccctgccattgttctcttcgacattctataatcatcaaggttttcttgccctcacctaggtcttgactaaacatgttgggtaaatgaatttcatattactactttcttgcgccgtcagccattgtgttcttggggactccatcctgagccttttttttttttttgagaccgagtctcaaaaacaatgaaggcaggtgactggtgaggagagttccagccactggattctccctcagtcccctgtgctgtggcccttggtgacccctagatttcagtgcccctgcctgacactggagtccctctgtaaagaagcccctttctagctagctagctgttccatcccgcacacccccacagaagccttttgctgccattagtaagcacgcctctattttctcacctgtgattgatcatgcatgattgagttttgtctattaaagcaattgataagttactaaaatggcaccaaaagaaattagaaaaaaattgttgcaaatgtcagtgaaatcttttaaaaaactgttgtactttagaagtgcctcaagtgactaatggaggcttaggactctgagtggtgtcgcaaggaaccttatgcacagggacactgacattagcctgtactgtcacccaggctggagtgcagtggtgtgatcttggctcactgaaagccccacctcccaggttcagcaattctcctgcctcagcctcctgagtagctgggattacaggcacatgccaccatgtctggctaaattttgtatttttagtagagacagggtttcaccatgttggccaggctggtctcgaactcctgtcctcgtgatccgcctgcctcggcctcccaaagtgctgggattacaggcataagccaccatgcctggcccctgggccattttttattcttactcttaggctaggtttctgcagaccttggttataactgcaggctctacattgataactgctgagtctctaagtcagaccagacgtttctccccatttagtgatacatgttttccatccaattgcttcatagacaccttggacacagtgctctatttcaatttatgttgacagttcatgacccaaactggaaacctgagttatcctggacttctgcctaccaccttctcctaagccatctcacctgtcctaaatgtcgtagcccttatctagttctctaagctgtcatagggtcctgtactgctgggctgcttgttgccttcaatagagcctggagcatattcatgtcggtatttcaaggccccgggcataagagcttcttaggaaatattggaatgaatgaagaaatgatgaataaatgaacaaatgaacagttgattgatttccaagacactttggggtggtttccatttagaatggtttttatttctttttactggaactaaggaattatttttgcttgttgatgccaacattttaaaagcactataattttgaaatgttttaccacattaaattcttttctattgcaggtcacatacaaatatgtcaacttcaaaggaggaattatttgttatatttatgcaaacttgtggcacttggacatttatctagatggttttttgtgtatgattgtgttcttggtacagctggaaaagctaactttaaatggcaggagtaattgatcttaatgacttactttgaattaaacttgtgcttaattaacttggatgttctaagtttctagagtcacagacttttagagctggaatattgctttttgaacttcagtgtaaggaagaattgcttatgctcgaattgatttgttctgtatcccaatactggactgagtagaaatcaattactttaatattggatgagagagtgattgattgaagatcaggtttttaacctctttttttgttctccttctcacagggagagtcccgtattctcagagtaaaagttgtttctggaattgatctcgccaaaaaggacatctttggagccaggtatgttggctttgtttttatttctgtggacttctgaaaaattgacaagcagttttcaaattcaggcacgcatcagaatcacctggaggacttcttaagacaaagctggctgggccccacctgcagggattctgatttaggaagtgatgctggcccagctggttccaggagcacattttgcacagggcttctggacttaccatcacaacagtagttaacagcctgttcttcacatgggctaatttcatgagattagcttctggtgttgtattctcagtagaaaaatacagtgtgggactatggctctgcttattttaatacttcaaaaatatttcaaacttagggaaacataaaagtgtcattttgtttctaggagaactggatattctggacatgtataatctgaattaagagatttggtgatttggggcgaatgtggtgatttctgtggcatttctagaagtaccagcagggaagcagccagatctttctgtgtgtttcagcttttttattttcagtattgcacttggatattcctgtatctttaaatcagcccttttgttcctattggctgtcagcaatgtgttgcatgaagttattggactgggagcagggtgagggtagccgtagagccacctggcactagaatttagccagattttggagaccaaagatcttttgaactttaaacctggaatggacatgagtgatgttctagtccaacttttccattttatggttgacaaagcttgaatccagaaaggttaaactacccgtgcaggtcacgtgggccagtgatgtttgaggagtgacaggaacactcctcctgcctctacccagtacattttcctttgtggcatggtggcctgaaaatactgtgaggtttaacaatgaaggcaggtgactggtgaggagagttccagccactggattctccctcagtcccctgtgctgtggcccttggtgacccctagatttcagtgcccctgcctgacactggagtccctctataaagaagcccctttctagctagctagctgttccatcccgcacacccccacagaagccttttgctgccattagtaagcacgcctctattttctcacctgtgattgatcatgcatgattgagttttgtctattaaagcaattgttaagttactaaaatggcaccaaaagaaattagaaaaaaattgttgcaaatgtcagtgaaatcttttaaaaaactgttgtacttagaagtgcctcaagtgactaatggaggcttaggactctgaatggtgtcacaaggaaccttatgcacagggacactgacatcagcctgtactgctggtaatgtcagagtgaagcaaatcccacctgaaggcactctcttgcttgaccgtgaagtcacactgagtggttcaccatgtgcctgcactcatgcaaggataagccaggtctctaggcatgggcagaaggatccctgcttcccttctcttccctttcagagcaacactttcagccatttccatgagtctgggctcttgttacccagctgaaatactgtttcctgaaactcacaaatttgctctctaccaaagcccaccttatgccctgcctttccatgaagcctgtcaagaaaattccaagaaagaaaatttgatattcctatatcaaagcgtgtgtctttcctctcctaatacctcttagctgccacagtaggtgcaatgtcattttagcttttgcagatgcattacctggtggtttcctagtatttctttcacttgcctcgattgctagattagaaatttactggggacagacatctttttaatatctttctcctactacttaacatatagagcatcaagggaaaaaaaaacaaaaattatcttttaaaaatgtaaacatttgcatgccaaccggtagtggattgtgcccttaggttaaaaatatgtattctcactctttccaatgaaatctgtagtgctgaaggagcaagttggatttagaaaattttggtgatttctttttaagcttgattgggtttttattttgttttatccaaaccctcccattaaaaaaaaaaattgattcacattgtatttctaagccagttaagtagatttaaggttgaatttgtagtggaattaggctccaaatcttagaagagcaaattcgtaccttgaatttttactgtttagataataacaggcagggtcatttctaagggacatggtggaaaggaatattcgtgatattaattagaaagataaatcgtattgtggccaagtggaccaagtgccagaaaatgcatcagaaactctgaatcctgcttctggtcttcattttcctagattgataagtaggcgcacacattcctgctttcctccctcctctgaagtgctgtagttcttcagggacacatttgccagtgggtctgagatgcaagtgtgaggtggcagtgtgggttaatgccatcttggtgtctcactctggagtggcactgcttattgccttaaaattttgccagatgacctgcattctccctccatgctatcttgggcaaatcccttaaaaccactcatgccactgtgtattagtgtacaacaaggataacagtttctttgtaactggcatgtggggaagaaccgcaaagtgacttctgtcggcagcagctctgtcgtgttttaaggtagtagtcaccgggcagaggtttggtagtgtcctctctggcagccaccgtctccttcagagccctgggccactgacatgccttttctccaagtctcttccctgagtattccccgcacctctgtgcctgatcagacacctcattctcccttggcagcaagaaggccgggtaggcattggagcccttgctgtagacaggataatgggtgaaagaggaagaacattttcatgagaggcatttcagagcctttaaagtggtagaaatcctgtagacaatgatgtttttaaaatcagggatttgcatctctgggactccaactcctttgtttccaagggaggttccctgggccacttggcctgaggttgggaaggggtcggtggttgcggggcagaatgtgatgcttggggatgcaggatggtcaggggcgggtgacggtgggaggagtggagcacgtcatctctccttgcccttccgaggtggtgatggaagctgcctacagctccagctcagaggccgggggtttctggggcccttggtgtggggcctctctcctagctggaggtggccccttcccccttgagaggcctgtgcctgaaatgcccttgtccttttcggccgtctcggccccagtccagtacttaggatccaagatcattttcagctccttccagccaagtctcactttattaaaggagctttgttcggagcagattggataaccgagccgcgactccacttgaacatctgagcagttggcccgcgtgggaaacagcaatggcagagaaagatgcttccctttggatcataccttgaggacaaaaaagggcagtcatataatctgtcatctaaactgggacgcttttgtctggaatgaatgcgacattgaatgggacgtccggacataagatgtaaattgagactgcagtcaccctaggtcagagacatccagcctttattatccatatcatggggaaaaaaaaatggaatgtgattttttttccccaaaacagcttaaaaaaaaatgctaagtaaaagaaaaaaataaaaagcaccttttaaaaaagcaggcctcacataaaatgccactaagacatcaaaagagaagtaaaaccctgctcaaaacgcccacgtggggcggccacagctcacccttgtgtgcctgtgtcccgtttctgctgtcccctttcccaaggacgtactctgccctaacctcaccctgatctggtgactcctccagtggcccatcctatgttcaccagctgggtcctcatctcctccgccacacaggctgctgctctgtcccccagcagacctctccctgtctctggggtgcccatgacccctgggaagtgctgtgcatagttctgtgagtgaggttgacttgttgttttatgcttagaattgtttctttctcctgaaattagatttttctcctctgatgactaggattctattttatttatttatttttattttccacgacctattatagcacatagcacctaacaggtcctcaggaagtatttaccaacagattgcatgaagtgagcccgttcttcctccctctctccttccctccctttcccaccccttcactggaaactcacagtcactaaatatgccatgaagttgctgccttttgcctttgcctgtgttttcccctctgcctggcatctgctcacatcctttctggcagctgccctctcatctgtcagggcccagtttgggtggcaacactcctgctgaggcccctgcccgcctcatcaccccagcccaagaggacagaacactgctgcccgcctcatcaccccagcccaagaggacagaacactgctgcccgcctcatcaccccagcccaagaggacagaacactgctgcccgcctcatcaccccagcccaagaggacagaacactgctgcccgcctcatcaccccagcccaaggggacagaacactgctgcccgcctcatcaccccagcccaagaggacagaacactgctgcccgcctcatcaccccagcccaaggggacagaacactgctgcccgcctcatcaccccagcccaagaggacagaacactgctgcccgcctcatcaccccagcccaagaggacagaacactgctgcccgcctcatcaccccagcccaaggggacaggacactgctgcccgcctcatcaccccagcccaagaggacagaacactgctgcccacctcatcaccccagcccaaggggacagaacactgctgctcctggggctgtagtgggtgtacaagttccctcctcctacggccccttgtcttagcggacttgggaggctcagaggctccagccctgtcttattggtgtttgcaggtccagaaatcttggcacatgacagttgcctggtaaactgccttgaattcattgagtggaacacaatatggtgtgctgtggcacctgatggccagcctggaggaaggggtacttttttctcattgtcatggaggtcccattggctcttcaagcatctctcccaagcatctaggagaggtgcttatttctcattctcacaaaggctctttgtggaccagcacaggaggcctgcctagggcttggatgaaaaatgagcatagagagaagaggttaagggaagcaagctcaagagtgggctcagagaaaagaatctgggggagtcaatgagatggcaggcaaggaacagtctccatttgatgctgatgtttgtgcagaatgactactttataccgtacagaaggagcacactctcttcttgtggtaggtcccagaaacttctacttgggggtacatgaggcccagctgggattgggcacagaaggtcatggctctgcacctgaccctcaccttaggggtcaggagagagccaaggacacgagtgatgggttagggaggactcaggcaccatggaatactgtggccatccttccatagaggagaggtacaggtggcaaggcaggcaccaggcagccgccgacagggtcaggaaccaaggcaggtccaggaaacagaggccaaaacagcagcaggaacctcaggcttagcagaccactgactcttctggaagtcttttagacgctctgtggtggggcagggacaagtccttggtgtttggccatggtgaagtgtgcagttagggtaggtgagtcgtgctttcttaacacgggggtaaggaaggagggtagagtttcagcagctcctgtttcttgagcacttgctatgtgccagatgtggtttgaactgtttacatgggagctcgttgggtcctcccagcaaagtcctatgtagcaggcactgttgttctttttgcagataaagaaactgaggcaagaaaggtttagtaagttgtagagctaggtattgaaccagggcctaacctcttaacagaagttagttagaggctgttacttgagtgctcacaggttggctggcaatgtgtttggaacccaatgtaatgtcattagattctgcctaaatcttgtgaagaggggatttccatttgataggtaagaaaattgagaagttatcatcagcccgagatcaaacaagggtatagggagtggtgggacctattaagttcagatttatgtgacttctgatgctatgctcagtgatagatctcttcttgaggataaaagtttgagaattagggttcctcgaaaaccctgagatttctttttttgaggggtacctttttgtgttagcagatttaaagagctggccattgtatttgatggtagctgagtaagccttttgaattggagtatcatcaactattactagatttagaataggtatattttgctaagtaagatcttaaagtttttcctttaaacttaggatagctgttcaaatttcaaactcttcttttttcagtaagctggagacatttaaccttttgtcataggcttaaagcagtcattaaacagggtcatttcaatgcaactttttaaacctaactcccctccctttttctctttaattatgatcagtggcttcatttgagcttacctaggatgcatttgagactataaagctgctttcttaaaacttagcaatgttggctgagacaaaccaactgtagaatctcatgctttcataaagaaggttgcaagacattcattcacagttgctcctttattgtgtgtgatgagccattggcatcaaacctgcttgggttgctatcagtttttcttttgagagctggtgacttgcaatttaaaacacacatgggctcaagggtattggagggacatggcagaaagtccttctgctgcctagtgattgagagtgatggggtcctaactctgtgtgaggatagctctttgacacagctcacctcagtcccctttacctaggtttaagttgttagcattttgctgtatttgctccatctctttttttccctgaagtattcagaagtgaattacagacatcatgacgtttagttcctaaatacttcagcccaaacctctaaaaaacaagaacatatttctatataactgtagtactgttctcacaaaattaagactaattgcctaatggactctattacctgatccattatctgaacttccccagctgaccttaaaatgccttttacagctggactgtttaaaccaggattcaattgagaattctgtattgcatttaatcggtgggtctattaagactctcttaacctagaatagtgataaaagctttttactcttggtctctttgcaaactggggacccccagccagcaacaccccacctgggtctcactctaccatgctggggtgccctagctcacctgtgttatagcttgtacctgtgttcagtggttcccgagttcttgcatggcacccaagaagaatgaggatatgctggacattgagggtgaggagggcagagtagaattttactgagcaatggaatagctctcggtggagaggggctgcagtcaggtgcttctctccttcccgtgtggctgggcccagggctttttatgggctcagaataggggaggggcaggctgcaggtagtattggaaaaggcaacatttgattcattaaaaggcattgttcagaaagaatcaatcaggaaagggtgggcagacaggaacagaagttctcgctctggttcgtgggtttcatccgggaccagcagtccagtctttcagccttcaggctgtttttggctcgaaggtggggtttcaccggggacccgcccctatctgcccaggcgtttggctgcttcctatcactatcaatagtccctccccttcaatgacttgtaggaaggttgtttcgcttaccacattccatcgtgtcctggtggcatcatcaatgaatgaacatgttcttttccccatgtttcttgtacgtactgtgtattagaagttggactaaaggcttgatcaaatttgaggcaggaatgggtgaggctacgtgcgactggagggacacaatgactggttctgtcataatcagtgattgaaattgatccctgggtaaatgtgggggcagtctcatccctccactatcaaaaattaacattttttttccccaggtgaccagcaagtaacgaggggaggggctgttttggtactgtatacctgcaaattttaaatattgatttactttacttccaaaggattggaaattttgtttttttctttctttgcccttctttgaaaacattgtacaaagtaaatctccttattttactaatggagaagcttctgaaagaggctgaacatacattgaagtacctttgctcagctgtaagcccttctggatcagaggtcagaccaaagtttgcagacagttggtccctgtggaccagactgaatccacacatgagtttatttggcctgtggagcactgaaacaaaaaaatgcaaatcctgagccaacgtttgggagatcccatattataatacaaatcgagatttccaggtttctggaaggtcttggcaatctagccacactgggcctgcatctgtgcaaggctgcatggctagaggtgtgtgctgggcacacccattaggtgggactgcgcctttctggccactagggaccgtacacctcctgttgttttcatgggggctggtttcccttgctgacacgtggccatgaggtccctcgaggtacaggccggcatttggacttgtcctctgcactgtttctttgttagcatttagaactgacttctcctcttcctcccccattgaggagcagcaccttactctgtgcagagtctgtctgtgatctgcaggctctttgcagagctacatttctctctggaggccttgctgagcagcctccgctgtctagggcattgctgagaatcacaacatcaacactaatggcccttgggccaaaaagtgtttgtcttaaaatccctgcaccaaatagcttgtgcaattactcctgtgagagccccagaggatctaactcttaggctgtttgttctagctgtattccttcccaccccccaaaccgaaatgacattaaaggatagtaactccctcccgcaaatatagataaaaacctctttactccctaacaaccacacaactatttacatttttgtgtttacctcctagtctttaagtatatgaatgcatgcaacgtcctttaaaaatatgtcaatcctagcctccacaccacccagccgaccaggtttcccagagggaagcattggaaatggcagatgggtaaatgcacagagctggcaaatctccatcctgcgggaggcttgctgtgcaatatagccatcgccacaataatggatcttcctaatgatccggaatcactgagcaaagactgtgccatgttcagtatacactaagtgagcatgcagggaatatatgatcagtttacaaacatttccacataagcttttttctctctcccactccagttttggtaaataaaagagcaaactagactgctttctttctctctctcactctccccctgtctccctccctcttcctctctgtccctgtccctctctcctgcctccctcattcactctgtcgtcctctctctctcctcctcctccttccttccttgcttcatttcccccctcatctctttcttcctcaccctttttaaaaagagacaggagtcttgctctgttgcacaggttagagtgcaggggtgcaatcatagctcactgtaacctcaaactcctgagctcaagcagtcctcctgcctcagcctccccagtagctgggagtacaggcacactaccatgcccagctaatttttaaaaatttttatagaggtgttgtcttgctgtgttgcccaggtgggtctcaaactcctgacctcaagtgaccctcccgccttggcctctcaaagtgctggaattacaggtgcaaaccactgtgtccagccagacaggtcacttttctgtaccattccctgatgttgtgagattagtgagagtccctactgtggaaccttgttcacgttgccctgactcctgatgcatggatatttgctgttaccaaagacacctctgctttaccaaatgttttgacagagtggaaggaaaactacaagacttcttgccctcgttttcttcagtctagaatgatgctggggtcactgagtctgtagggcagagaatctgatgtgttttttaggaagcggaaggtgtctgacacatagatgtttgacaaattttgttaatctggtcagagtgcagcctagaaaattaaattaaaaagctgctgaggagtgctggggtcgcattttgacatagatacaaaggcaccaatagggccaaaagtatgaggccagtcctagggctggtgaagtttggatcccctgcctgacattgtgtcctgagcccctggccccttcctgcacctctccctgagccgccggcccctcctcattccttcctctcctttatcttccgctgtctttgcctgtgcccccacgcccgtgccctgaatctggagtctttgtcttagtgcattctgtttgtctcactgtcttcctctgttttccttttcttgcggggaggaagggtagaaagagtgtaagaagctcaagtatgaggaagggaaggttgccaacttgagatgagtcagaaatgaaagcagttctgaatgtgtaagacaatgaggaaaatatttatttaacaaaaattgaactaccaaccaagccttcaggaacacagccagaaggtgctgtgtagggagaggtgtgcattaggatgctggagcgtggctgccggcgtccccaccccaggaggaagggactcgtttctctgaaccttgttaatggttctccccattgtagacaggactggctctccaccccatcctcagtgggtgcagctttggggaggccgtgaggctggtgatcttggggcctcctatgcatctgtgttattgaaggtaacaatgtcccttctacccaaaagtcatgcttttaaaaacgcacaatcttgaatccatttgggaaacatctttggaactccagaatgttgtctttctcagatatgtattgccaatgttgtattacttcatttgctaagaaacattgtcatcgactttataaaattattgaataattctatttgggggagaagcctggaagctaagattttaaaggttatttataagttaagtgaactggcaaattcttaaatggtaaataaaacctttcctacatgctataggtagttatctaaatcagggcctaacaagcttttttatttattttcctgtaaaaagccagatactaagtagttgaggctttgcaggactgatggtctctgacatagcactaaagcagccttgggcaatacataaacaaaggggcatgtgtgtgagctgatggtccacgggctgcagtctgccaacctctgatgttataagccattgattttctacaacatatatatttagaactgggagtgtcagtgttattttgtcatggtttccagattaaactctttcatattgctgctggtcggtcaatgacagactaattctgctagcattgactttctgggccagggaatggggttcctagatagtgcagtagctttttatttattttcttttccattcaagggtaacatgcttaaaatacagcgtatgaagcttttggatatccactgtaaattttaaggtctaaaaatgaatgcaattgtgaaatgtttttgccttagagaaaacgctctcactgctttgtgttataaatgcatgaaaaataatgatgaattaaatgcatacaaacagatgcagacataatttagatgagtgtattgcaattaaaatattgcccactttcgctacggaatattcgttggacttatgaccttagtgtaagtaatgtttaataaggaatctgcaatgtgtaactcctccgtaaattattaaaaggattggcattcctactgtataatatcaacacaagggatagaaaatatgcctggattcttaatgaatgtgtgctaacgttccttctggcataggaatgtgtagtaaatacacttcaagggttgttcgcatttttatccgtcattgttataggcatgttattgtgtgtctcctattgaagaactgattgatcattgttttaagcttctgtgacttttagatgcttaaaactaggcgttcatggtaggaaagtagagaaacatgtggaagaaatactgcgtttcaagtttgggagtggctggtagaaaaatcaaactaggctagtcttacagctttatcgcagttttgttttttttcctagtaggaaaatgatagtattggttgtatattaaaacactctctctgacactgacttgaatcacgtgcgagttcattgagaacagggattttaacttggttaggtgattttaaacattatttagcaaatctggaaaacaaaagagaaattttcaaatatctttcttccacggtggtgtactggctctctggagtgtgatttcatcttctcttattattgcatatgtagtcaagccatcatgttcttgaagtgagacttcaaccactagtggggccgtataattcaggatcttttgtttgtccttacatagtttcttggcctggaatgtcaaaatatcagaaactgttctttctctggaatcatctgtctccgtgatggcctcgccatctgtacagtcatccaagctagggaccaaagagtcgtcctttactctctcatccttccggctgctgtgtctggctttcagtgtttgtgtagagcaggggtctccaactcctgtggcgtgttaggaagtgggccgcacagcaggaggtgagccatgggtaggcgggcaaaacttcctctatttacagctgctccccatcattcgcattgctgcctgagctccgctgcctctcggatcagccaccagcattagattctcataggaccatgaaccctattgtggaactttgcatgtgagggatctaggttgcacactccttatgagaatctaacgcctgatgatccgtcactgtcccccatcacccctagatgggaccatctagttgcaggaaaacaagctcggggctcctactgattctatattatgaagagttgtataattatttcatcatctattacaatgtaataataatagaaataaagtgcaccataaatgtaatgcccttgaatcatctccaaaccatccaccccactcctccaacccccaaaccagcctggagaaaaattgtcttccacaaaaccagtccctggtgccaaaaaagttggggaccgttggtgtagaggactcctcaagcagcgtccatatctgccctattctctctattcctccacctaggtatagaattctatctctaagacacagacagaccatgttcctgcctgggcaaacacttcggtgactgtgcattgccctgggtgaacgggggcacagaggtctttgtgacgccctgcaacgcatccctctccgagccgcggtgcgctcttcctcctctgtgccttgccggtgcccagaaccacccccttctccctctttgcacaagtgccttgctctctcctttctcaggccagtgctgctgatctgtctgtgtgacccgggtgcacagtccttggctctgtgcctggccctgtgcaggtctctgtggtggcacttagcacatggcgctaagattctccctgataggccttcagcgccgcaagggccagcaccgagtcctgcacatcctgctctagtcccacatcggcccaggggcgttgagctgaggacagctccctaccccctttctgtgcttggccgactccagcgcccgttcttctgcccctccttggctctgcctccccaccccttggctgaatctctcctcctttcgtgcttgttctccaggtgacttattcaggtccatattttcattacccttgcatttcattaattttctcatttattttattctgtaggtttaggacattctttaaaacatgcaggttctgaattttaataatataaaagtcctctgtgagtgcccatcacattgcttttctgtcctccctacattaaagttagcactgatgcctttatgtttaaggaaagcctcctgcagaggggctctgcccatgtaagttcattagaaggcaggtgtacagcctctgtcacctgaagacctcttaactgtctattccttctctggtctatcgaggtgtattgggggggttacagcaccctctggtggccatattgtcaggtgcatttttgttctagccaaataaaatgataacacaaatcgaatagtcgattggagttctttttcagaggacatcgttaattcacattttgtgtgtttcagcaggtatttaagccattctcgaatagtgacacttatgcagaggagagaatgattttatttaagtaatttctactttttacatagctagttttaaagtagataatacatagtcttaaactttatttcccctttatttctttcttttctgttagagaatttcttaaacttgtagaattatccaaataaaatgccagtcactaaaaaggaataattaaccaatagtgggaaaaaattaaattcttcaaatgaagagtactgtattcatttcatatggtcccagagataaaatgtttaggattcatttttagttttaaatgtttatgaatcagagcttcaacactcttccaggtttctttaagaaaggaatttgtctatctacggattaattaattagcagagcctctctgtgtcaccaagactggagtgcagtggtgcggctgtagctcactacagccttgaactcttgggctcaggcaaccttcccacgttagactcccaaatagctagaccatggtgcatgcaaccatgcccagctaattttttttttcaatttttctgtagatacagggatctcgctatattgcccaggctggtcttgaactcctgaaggcctcaagcgatcctcctgtcgtggcctaagaaaggaattcctcatatagaaaaatattgttatataaatagttgcctatatccatgctgtttatggtaacagctaaggttcatctcaaaagtatttgtatttggctttggaataaaaagaaatttcccctttcatagggttctgagattgtaggagtttttagtatttcaaaaagttaatggaacaatctgtgatgtgaaagagactcagaagaggctagagaggtctttaacacattttttttttgtattgttatcccttccctatagctaactttgtagatgacattgtttttcagactgatgattgtgaccctcaaccatggcagcaacaatttttaatttaaattttttaaaatgcaaggttgggtgattttctctctggatgcttgagttttgtttttgataaaaattctaccaggggcaggggaaagagtccattaagtcttggtgcaagaaacctgggcagattgcctaagtggatatgcatagcaaagaactgaaaacagagtagggggtgctgaaaacacccacagaggaaaatgcggggcggggggtgaatgcatctgctcattttgtaataaagtccttcctttcctttaacatctcttaatgttacaaataccaacaaaaaccatgcatgtcttcagtgggacagaaaatgagggaggcatttagggagaaaaaagtgtcagttgagatgatgttaaaataaagtttattttctttgcagttgcagacattaagatttattctctgggctgttaggacagttcctgcagctctctgtggtgacctgagcattgataccttttttttttttttttttttttgagatggaatcttcctctgtctcccaggctggagtgcagaggcgcaacctcagttcactgcaacctcagcctcccaggtagctgggactacaggcacctgccaccacacccagctaatttttgtatttttagtagagatggagtttcaccatgttgcccagagtggtctcaaactcctgtcctcaagtgatctacccaccttggcctcccaaagtgctgggattacaggcgtgagccactgcgcctggcctgtgccttggtttctcagatatttctgcccctgtagtgttctatgcactatgcagggaggtcctgactgctcagagcttaaattctgcattcctttattttaagtgtttggccaactgcagaggaaggtaccttgaaagatactccctctcctccctcactgctgggtcccctgtcataggagacctggcctgaggaggcttcttcctggtaacctgggttgtcactgggaccacatcttcccataagaataatgcttcaggttgtatgggagaagtgtctgacagcagtaacttcagcacaccctgagaatggcccttatggcagacacaccggacagcagtcactgaagaaatgagggttgccacatggaggttgctgggaggagggtgctaagtgaaggtgctgtataagctgcatgctttttacaagcagttgaagttctgctgtccagcccagagccactgggccaccctataaataagttcctccaaataaaccctgtgccttgtttgttagctctgggtctcttctttggcttcttcaacttggtgctgtccctgttgaagttaatacgggtttggcacaacacaggagtagacggttacctgtaccctgccagctgtccttgctacaaacatttgcccagagagtggcatttgtgccggttcttaaagtgtttcttgagctgcacattaataggccatgtcctctttcaacctgccctctggctaggtagaacaaacactcttcacctgggctctgagccagctgctcacctgcagcacccccctccttggagatagcttttcatgttgcatcttaccgagttgattgagtattcacttcgaagctccatgctgcacgcatgggcctgtaaatagctttttcgtgcacttgtgggtgtcatttcagatcgcttcatcggatttcagttacccaagtttttacttggttcaccgtaagtttgcaaaaaagactttttgttatcctgaacattgcaggtggaaacatgattaattttgaattatttttgtttaacttctaccctctttcctatttacagcctattttgtttattttaacttccgctgttaagacttctaaggccaggcatggtggctcacgcctgtaatcccagcactttgggaggccaaggcgggcggatcatgaggtcaggagatcaaggccatcctggctaacatggtgaaaccccgtctctactaaaaatagagaaaattagccaggcgtggtggcgggtgcctgtagtcccagctactcaggaggctgaggcaggagaatggcgagaacctgggaggtggaggttgcagtgacccgagatcgcgccccattacttaaaggaagtgggcttgtgttttgtggccttaaggatgtaatctgttggtaggagggaatgagggtgtcctggtaggggtgtctggctttagtgtcaccattcttttaggaattgccatgttgtggggtcacgtcttgtaggagaaacgttctgaagtcatgggattctctaccctcctctcctgctcttggtttccaccagcagcctgcttggtgtggttttgaaatggagcagagatggttttgatgagcctcactggaggtgctgctgagattaccgagaggccttgctgggcacctggagtcaatcatgccgggcactagcatccgtcatcttaggaggtagggattattatcctacctcctaagccatccctggagtggtggcttggagaagttttccagagaaaccgatcagttcataaagtttctgtaaaggattaacacagtgtagtccagaaatgtttgttcatgaagtcttggtttttgggtttaagaaagtgttctcctgtctgggcgtggtggctcacgcttgtaatcccagcactttgggaggctgaggtaggcggatcacgtggtcaggagatcgagaccatcctggctaacacggtgaaaccccgtctctactaaaaatacaaaaaattagctgggcatggcggcgggcgcctgtagtcccagctacttgggaggctgaagcaggagaatggcgtgaacgcaggaggtggagcttgcagggagccgagatggcaccactgcactccagcctgggcgacagagcgagactccatctcaaaaaaaaaaaagaaaagaaaagaaagtgttctcctaagtgctgctcaccctttttcccaaacaggacctaaccctgcgagggagggtgaattaggccatttgtttacagtttcatcagcaccaggcgtgcacggcgttagtcatggtccttgctctcaaggcactgtacttgtagcagcagtatggtgcaaatgtgcagctgaacagtgggcacaggttcctggttagcatttagtgccacaggaatgacagggaggtcttaattgtgatcggaccgtgggagctggattaccccagactgtagctcacttccctgtaagcttttggtagggagcttggaattagcaccattagtagaaacagatttcaaagggaatggtacctgttccgtatgaaacactttaaaactcccggtgtccacacgtctttaaaaaagaggcttaaagcagtttcatttcatcaaccccaaactggagaagctatgaatgaccacactgatgaatatgtcctaaaatatatgtatattatataaagtgtaaaaacagacaagcaggaacatactaccagtttctatcacagctacccttaaactatcattggagggcaattaagtgggtacaacctctagctatttggaaatatgtataaaaatgacaaatgcctggttgggtgctgtggctcacgcctgtaatcccaacactttgggaggcctaggcgggtggatcacctgaggtcaggagttcgagaccagcctggccaacatagtgaaaccccatctctactaaaaatacaaaattagccgggtgtggtggtgcatgcctgtaatcccagctactcgggaggctgaggcaggagaaccgcttgaacccaggaggcagaggttgcagtgagccaagatcgcgccattgcactccaggctgggcaaaaagagcaaaactctgtctcaaaaaaaaaaaattaaaattaaaattaaaaagtaaaataaaatgatgaatgcctgtactcttagacccagcactcccagttctgccagttcatgcagcagatacatatgcacacgtacagagaaggatgcaacagatacatatgcacacgcatacagagaaggatacgtatgcacacgcgcacagagaaggatacatatgcacacgcacacagagaaggatacgtatgcacacgggaacagagaaggatgcacaagaacatacattccctagttgacggagtcgcagattagaaacaacagaaaagcgtccattaaacaacagtttgaacctgtgttgagatatcagcatcccttctccttctctcccccactccctctgccctctgcaggttttattctcagcctgattttctccattggatgtcagccctaggctggcatttgcagagagagatggtggctcctgcagagcttacggcctgtattttattgggctgtgttgagttacccctgatgtgagcaggagaatgggatgttctgtaaattggcctctagcccatcgtgaattcatattttttttataatgtgtgagtcacactcccttctgtcttcatttccttttcacactcccagcagatcattctctctattctgattggcattttatacatgaggcagcagaggctgagacctactgtattttgagacactgtagctttatatggcataattaaatcatagtcatcaatcactcttaggaggtaaggattattattggcattttccagatgagaaaaatggaggatgagaaaggttaggcatcttgctgaagtcacagcagacttaagtgccggagttggagctgcattccggtatgcttgcatagactctcttctcatgctcactgcacgccagtcacctggtatgctgaggccctgcctccaggccttctgattcagctggtctgcagccctggcatttccagctcctcaggtgattggaatgaaagccagagctgggagccactggtctacaccaccagtaaatgatcgggttctcacttgatcatttaattaagaatcttggttttctgctttcagtctgagaactcttgttcatgctctcaggcatgtcttcacgcaggaaagtgatctttgaaattaataggtgcttggaaagcctttaagcagcaggcagtggagaaggccactcagtaggaagggccgagcatgaagcctagtgcacaggcttttcaagaccccacggagggtcttcagaaaaatgggtttcctttgtctccgtggcttccagtctttgttggccagcagttgtctgcttcaaatgagctggctctagaggggcctggagaacccagaaaaactttgtgacaacctgacaagtttgtgttaatcttctgggcattggctttctgcacttattgctcactgaatcactgaaccaggcaggtggggtactggagggcaggggatgggtaagaagggcagcctttggaaggaaaatcagcagagggcagggaccggggaagaaggagtaagaagggaaacccttttcttaggttcttataaatcagaagagcaataaagaaaaaatttaaatctaaaaaatacatgattaggatttaaatccagtatgcttcactacatataaacctttgacttaatattttctgtagtagatgaaaataggactttttttgtttcccttctcttcacatggtattgagtttttttgtgttctgaatacgtgttaagattaattatgaaaatcaaattaccagatacttgaaatataaaattagtaatattcaaagacgattaaatgcacgatttccttttctcataaaaaaagaagcagacggaacttgtattctgaaagcaaatatggaaatcacattaaaaatcagaaaatcctcaccaccgccccccacccccatgtgcatttcatttctctttggtctgagttcaagggagagagaatatgaatgtgctgctagctcaggaagcttcagttctaactttctaaagagctgggaatgtgcttgagtctctgttatctcttgtttgcatttttcgctactttgcctccatttgatccagggaaaacttcatggtagggatgtgagatgtattttgagggctaaaagaaaggagtttgaacaaaagcaggacagtgttccgaatgtggaagcaaagagtccttccaaggggatgtgcggccaacgcctctgttcagcgatagtccagctgagaccaggacctgtgcctgatgcccaggccaccccacaggacggtcctccagcacctcatttctcctttcatcagacacctcttcactggcctactgggagaaaacggagatgagtgaaaatgtgcatacagaacatagggctcaaagggaccctagcaccagtggtgctcaagcctgtcccagcattagcgtcacctgggagctccaaaaacatattgttgccaagactcagtccaaagcaagtgacttccttggcctggagtgagatgtgggtggccagggtcaggaaccaccgagtgggtccacctctgcagactgggaaacagagtctgggaggctgcttgttccctcaaggacctgaagtgacatggggaggcaggactagccttggggctcctaattctgtcctggcctgtattccagtgtgccgtggggcacgtccaatttgaatctggccccagtacactctcaagccctgtgttgctctggtcccacagcttctgcccttgactttccatataacagcacattggtggccagggctttgcactaacctacctgcctccaacattgtttttgaataatggaagctaagcagatgcatattaatgcctgcattatggagaagactgtctcttcacaagtaatctgtagttgttagtcttgaaagtgggttaattcattgtctttctagagaaaatgattgcatggcctaatagtcttccagttagtctgtgtggcaaggtagaagccaggagtggattcttagctcctgttgagtgctgctgtcctgaatcagagatcttctctcccgggccactttgtcatgagcaggattttgaaccaagaccttttcttcacctgtctcgggggccctcaccgtgggctttgtgatcccctgacagctccaaaagcctttatcctcatccaatatctggtgaacagctgacacctcctgggaatctttaaaattgttctctaaagaaaccattctgctgcaagtacctatttttagactttataaagcccacgtcaggttgtcgctgcctttctctctgtctgctaagcctgctgtttgaaaggcagcaacaggatcttttgtctttaaaagttcagccccagctggtgcattccccacttgaactccatagccctggtgtgctctggggtacgtctcttccaaaacccaaaccacaggcagtgacctttacaccccaggagttgaaataatacacctggaggaagaaaataacttacaaacaatgagcctagagtataaatggctatgttttaaaaccctcgattttccttgggcgtatttaacctgtacagctagactgttgtgagttttgggctctctagggggctgtccaagttcagaacaagtgcatctgctggcagccagcttaaggagttagcagccctcaattccaataacgaacgtgtaaatcagaattcaggtgtgttgaagtggggccttgcacacatcctggtcagcccagggtgatttcctctctggccagtggttttgggttttttcttcacatgaactcgtctgttgtaactaatggtcactgagtgacttcagaggtagtgatagctcatagtgaagcccgtgacccacagcggtgggcacacctcgatcccttctccttttcctccatccccacctttctctccttacttcatcccttcctctttccacattgggtcatccagcagaagtcaagtatcttctatttcatatctttattgaataagagttttacgatccatgttattgaagtaggtaaatggaatctcttatgtggaattctctaaaaaagaatcaaaactccagtcaaaccaaaccaagtattccaaatcgtttttagggaaaaaagatataattagaaaagactggagagggtatgcaaactattaacattatgttagggtggtaggagtataagttatatttgctttttctgaatttctaaattttcttcaattaacatattgttcaaagtatcaaatacatagaaggaagagtgtgcatgcctgttatctagcaaacacacttcatgcaaagaaactctcctaaggaagtatgaagttatattttatccttatctatccaaagagagtgtgtgtgtgtcatatacctaaagaattagttattaagatgaagcattgcttataatgaaaaagttgaagcaccctaaattagcttaataatggtatatctttataatggaatagtataaagccattagaaatgatgttacagataagtatttaatgttatggaaacattttataacatagaatgaaaagtaaattgtagattggtttgtataatttgatctcatcttaggaaacacataatacagaaatatagatgaaggtctgaagggtattaatgccctaatgtattagtagcattacctcagagaagcaggctcatgagtgtttattttcttttcttctaactaagtatgtatatgtgtaagtgtgtctgtatacaggagatgtacatacacttttcttgtgaagaatctgtattgcatttactactggaagggtttattttagatttagatattaaagttacctctttgagtgagaacctatgatttatacttcttagcttaccttttacctccattatttaaatctgtctttttctgccatcaaatagaagatgtaacagtgataaaaaggctgggtatggtggcttacacctaaaatcccagcactttaggaggccaggggttcgagaccatcctgaacatagcgagtgacgtagtgagaccccatacctacagatttttaaaaggttagccagacgtggtggtgtgtgcctgtagccccagctactcaggaagctgaggtgggaggattgcttgagcccaggaggtcaaggctgcagtgagtcatgaatacaccactgcccttcattcagcctgggtggcagagtgagactctgtctctaaaagtataatattttaagaaagaaaaaacaaaaactagtgataaaaagaacttacaacaaactgatttttaagtggactgttgataattataagggctgagatttttaattgccatttgtatcaatgaataacccccctgtcaccacattttctggtgtgtttggtgtgtctggttcctataggagagacagtaatgctatttgacatgctttattgctgattagaagcctaatctctgtaatgggaagctcagtaatgaagcttgttcagaattgtgttacagtcggttaatgaagctctgagatcaagggcctggcttttgatggcccctatttcagaatccagaggtttgtttctatttatttgggttttgcaggtaagttccctggactgaggtgatctgaaggttagctctgctataataggtaaattgctaagaaaaacattggccttggtatgtacaacttaaaattttattggtgagatagtcttcttacaaaacaatcacgttaagctagaacttggtgtataaccagcatatatactcctgccaccctcagtgtgtagccaaagttctaaattgcatgcacagataacaggcatataattggtgatttcagaaaagttatacctggtgggcagtgagaggcgagccctgatctgggaaaccccagtgcttcaaggggaagcaatctgggaaactccaatgctgggattgggattcaatctgggaaaccccattgctgacaaggtacatggtacaagcttgataaaaacttgcttaatgtcacacttgtaatcccaacactttgggaggctgaggcagctggattacttgagttcaggagtttgagaccagtctgggtaacacggtgaaactccatctctacaaaaaatacaaaaattagcctggtgtggtggcatgcacctgtagtcccagctgctcgggaggctgaggtgggagaatagcttgaatacaagagttggaggttgcagtgagctgagattgcaccattgcactccagcctgagctacagaaaataataataatttaaaaaaacttaatgatgatagcatttgagttggcttttcaatcctggtttcctaaatatgtgagcctggaccattaaactgtgtgacaaggagctgtcatcttaacatacagacattaaatgcattgttcaagatcagaaatgatttcttggttctgaggcactattgactgtgtgtaaggtgccatcgttaatttggtaacaaggggagacagtggcagggaagttccttttgcctgtcttgtgataggcttcctattttctcaaaggttaagatattaaattgtcttaagcaaagaaggtatttaagggcatcatcagggttagttctcaggtctcctgactcctagcttctctagtttagtgattcacgttagcctttcaacagtttaccactcactttaatggtttttcctagctgtcttgacatgcttttcactgcttacatggttagtttcctacctagctgaatgcaggcatctgtgctgtctgctgggttcgctggtggtgatgcagcccacaggtacctgtctctttgaggggagttcagcaaccatctatttatgtcgaaaggcactgtactgggagatgaagaacacggagttctaggcctccaggaatttatcatcacttgctaatttgagctgagcctggcacttgaacataggccatagatttccagatgtgaaaaaaagaaagaaagaaagaaaaggatcctttaatgtatagacttgtctttctgcctgctttcttcacttctgatcattttaaacaattgatatcctagtttgatgtgatcatgttccaacacagcacaacagcatgtatggtttggggcatgcacctgtggcagttgcaaaggtttttacagtgaagtggctaagaggagagtaagaccagtgtatagggtgtggatgaggtcagatgcgagactatttcttgatttgagtcattttatttaggagctatttctttggaatactttatatatgagaatgtacatctgattggaagacagaaggtactgaaatttacctcttgatcaaattattctggtataaaattaaactaaataccaatcatatacttaatttcacagacttgcaaataatatactggggtaatggaagtaagagacaggaccttttatgtggtatgaagttctgtgataattcctatcttcctttgtacctaaaagaggcaccctctcctgtcatactgcaaacagatgccactactacgtgtagacacatttgccagctgtggcacagctggtcacccagccctcatcacagctgcctgtaaaacccagatttattctcttccccctgatcttttttagaaattactggtatcgttttagagagtatccaacttacacacaccacttaaataatgaattttccaatttcttctttttccacggccttcacgtcatctggtaaatattcccctcaggttggcatctgcttctgagaccctgctggacctagatatattcaccagagatgggtgaaggctttggaagagtgaagtggttaggaacatttcttccgatatctcctgctcattgtttttgacctctctgatttccagtatattctctgctccagccacacagctttcctgaacagctaagtcttgctcaccggtcagggaccagctcaaaggctgtccctttttaaatttatttcctgggtcttctcctggcctcttccctgcactcggtggagatgcctgccccatggttttcagtagcgttggctcttagctgttccgttctggggaaggattggttgttttccttttctccatgtgtgttgtgaatttcattctgtgtcaccgcatcacgcgaggtgggtagggaagagaacttttacgctccccgctgtcgttagtggcctgattacgagtctgtgggaaagaatgaaggttggaaagaagatctggtgggaaagaacaagggttgtccttgagcagccaaactaagctgtgagaatgttaatgtaataaagcaggaattctaatgggctgcctgctacagaggagatgggagatggtgtagggctcatgactgtaaaagcaggagccaccagcagatggtgatgcggcctcttggcccaggtgggactctgcatctccccctcccatggacattcacttgataagtgttgggccggtcacccatgccctggtcgttcttatcttatcgaagagtgctaatataagtaagctgtaaattcccattgtaagaaataattgccttttaaaagggagcattcaagaaaaagaccttttggctcaataaagcctttattttcctcaacactcttggctcttaaaaggggcctgttcttggccttgaagtgggaatttacacagaactttaaacagaagaaaccccctctgccttgggctgcaacttgttgtccctggcagggtttgggctgtggggtcatgggatctgtttgtttgaccgttgtatgcaaaaatgattttaaaattggcctccctaatctgttggagacattagttaaaaaaaaaatgagagtaaagaggaaaatattttgctattgggtatgcactggatccatttttaaactgagagaaggtgaaaggggtgactggttgatttcggataatacttttagagccacggggaactgtgaaagacaagaaaatgtaaaaaaagcacattgattgcaggaccggtggtccaaaagcagcacgtgaaagaggtttcaaggctgtttctacaaacaagaatgccaaaggtggcataggacaagaagcttgctggatgtcacgaagctagtggagatgggatccaaagctagttttggctgatgaaaatacaggctcatgccctgtatgtgaggacagtgggacagtaatttaaacagaagtatctagaggagtttccttattgccttgaatgtatttctttttaacattgctatggacatttaggaaaagatgccactgatattccaaaaggggcattccatacacctgagagggatccctgaggctccagggtcacctgggccaagccaggtatacacacgtctcatggcaagttggctgttatcataacttccctggtgttgttttgttgcaagggcagcattgtggggctgtggtttgaattgcttttttgtgtctcttgaatacacgaagttcctcctatagtcattggctctgctgcctctgatgaggcacttccgtgttccccacatttgaatttgctcccgattcgagagaggcaggcatccgcggcagcagcttccaacccagacaggcttaagccgcgcgagggtgcccgggtgggtggctgcgcagggccctacctgggcgggagcggctgcagagccctgtccacgcggtgcctccccagcacggcacctcccactccaggctgttggttacctggccgggagctggcggagaccaggatttctcctcgccgccgttgctgttgttaggggaaacagaccatctgcatctagacctgcctctctctccgctccccacttcagacgagctcttcctgcctggaatctggtaagtgccaccgaaggttccgttccctttattactcgattagtgcccacagcatcaggagaaggttctcttaccgtgaatccattagctttaacccaaatgtgcaggattagggggattatttgaacttgcttgctttctttttaaaatgtccattagacattttttgcatgcttcaaaatcaaaaggcggcacagtgaaaacattttaattatttatgtatttaacctgtatcatcttgtttctaacctcttttcttcagggtggtgcagtcaaaaattacacagatattgctctggtgcctctccccccttttatgaataaattactgcatttgtcatcactgtgttcctgaaatgtcaaaaatagacactgtaaaggaatctgtcatgcagagttcagaaattttcaaatttctgagttcaaaacctcaggtgaagcgaggacagatcttttatttaaaatttgattctttgtaggcttcactgtgaaataagttcaatttagagcatagctaatgcaatcagccagctcgtgatgggacaacatacttctctattgttttacattcacctcctgggatacacacactttctcatttgttttataacctttacaggaaatacctggggatgagtcacatgacccctaacttgagtttttacatgtattcacccagattaaatgattttgctcttatatggataaacgtgcagttaggaactttaaaaaattgtaaatgaggtgcataatcattactcattgtcttttactgcattcttcagccctcaaacatacaaactgttattccctttaagagaaaataaaactggcacttatgttttcctttactctaagttaaagactacccatgttatgtgccattaaaaaagatgtagaaattaatctgtctttttctttgacctaatcttactagcagggatattggggctctacttttctgttctctctctctctttttttttttttttttttttttttttaacatcagccacaggtaatactctccggtaaacatataacttgaggaaaattgaattaggttaatgctggaatagaaaaccagggcagtgcctgctctttttggataattctgtataaacaatgagaaagtctcaggctgccttagacaaaggctgagacgggagctcctgatgatttttatgagggggaagaggagatggtgaggaggagggcaccgagcatgtgcagcaacttgaagcatgtcagaaagaacatttgccagaaatcttcaaaaccgtggcggtcggtaatgtgtgaaattgaacttctgaccctgtttgcttgatggcgacttctcgttgtgcttgagaattgtgtggcattgggtccctggatgtgggaggaacagcaaagtggtttagtgaatagagagggaagtgccttcctttttgggtgggacttgccatgatagagcctgggccgtcaccttaaaaggagatgtttctgttgagagatggaaaattggcaagacaaacgccataaaccttaacctgtttataattccttacctgtaagctgctttgcacgcaaggtgatggttctacctcataagggacaaggaagaacagcacataaacctgactgaatggagtgtggctgtgggtgggagcagctttacaagaaggaaacggggccccctcctgagacacccccgtttgcttctgctccttccttgccattgacgtgcccttctcctgaaactacccacacctgtgtttggcaacaagcggctgccccttgatccagatgcatttttcaacttgcgaactctcacctcttgccaagggacccaagtacctggttaatgatctttaatgtaaatgatcctttgccttgattaacattgagctgggttagtatgcacaggccgagctccgtggtcctcccatgtgatcccttccctgccagccacctgcccacctgtaggaactgggcatggccagttttctctttatgtgctctctttgccttggatggaatttgggctgagaccgatgaggtggaaccaaagctgttcagcagaagagagcaaccacagagcagcctgttgggtggagggcttgagggttcctaaaatccgaggactttctggtgagcctctcccctgagcctgcttgagggaaggcgctgccccacacactctccagtgggtgggggtgggggtggcagcggctgatcaaaggttctcacctgcaagtgataatagcctgggtctctttggcaccaacctgccttcttcacctttctgctcagacaccccttggcacccctacataaaggaaagagctgtctggatggcctagtaactgtaggataggtaaagttagccctttcttctgacctagatatgtgatggtggtatttctacatgtttatgtcgagaactttacaaagatgaaagaaaagctttcagagctgcagaaatgagaggtggcccttttttaaaatttattttaagaaacaacttttaaaaccactttttgaaaaattggatggcaccgtcctgcagcctatcagatttcccttgagaactggggattattggcttattccttgctacctccaatcccaaattaagcagagtgacatgtaagaagctggggacatcagcctaaagcgtttatcaggtatgtccttcccaactggatcttttctactccctggcccgaattttgttttagggaatggggcctattttaattgctggtggcaaaaggatccctgggcagtgtttccatggtcctctaaggtggagtgtcggggagctgggggacacacagtggtcatgggttatctgtcttggcctctttcccagaccaagttctgtctcatgcttattggtttggctgctagttatagaatctgatgtttaccttagaatcctaggatggaaagggttaagaatgatttctaatttgaattccttgtttctagggagttattaaacctatacattacatttattattttacaaagcactaattcataatagttgacaggaacaactattttttggcttctttgtttttttgtttgtttgtttgagatggagtttcactctgtcacccaggtctggagtgcagtggcgcaatctccgctcacagcaacctctacctcccaggttcaagcaattctcctgcctcagcctcccaagtagctgggattacaggtgctagctaatgtttgtatttttagtagagacggggttttgccatgttggccaggctggtctcgaactcctgacctcaggtgatccgcctgcctcggtctcccaaagtgctgggattacaggcatgagccaccacgtccggccttctttggttttcatattgattatattttctaagacaaatactcatttatatagtctaataaaaattgttaaatctaattaaacaactaataaaaatagttgtttaatccacgttgacatcttcttacattgcgatagaaattttgatatatttatccatatgatgaattgcttaaagccggtggttctcaaccagtggcagttttgccttctctcccacaagggacatttgacactatctggggacatttttcattgtcatattcaagggagtggggtgtgaagctggcaagcatctagtgtgtagaggcctgggtgctgctccactttctacattgcacaggatggcacctgacacacagcctaaagcgtcggtactggttgaccgtatacgaaatgctgtggaagaccaggcacggtggctcacgcttgtaatcccggcactttaggaggctggggcatgaggattgcttgagcccagcagtttgagaccatgtttaagtttaagttcatttaagttctctgaagtggtgattctgatgctatatagatgaaggttggtttgttgaagagctgactctggtatttcatccaacatctgcatttttctttagctaaggatgccttgagaaacattctagtctcttaggcctgaatttgttattagcttaatagctttcctctggttgaatttaaatggaaagaaaattgcatcttgcaacaggaaaaagaacattagggaaaaactgaggaaatggaaataaagtgtggaattttgttaataataaatcaaccttgatgcattaattgtgagacatgtcctgaaccaatgtagatcttaataataggggaaactggcttcagggtacgtggggactctatcttatctttataataattctctaagtctgaaacaaaaaagtttattaaaaaagcacaaacaaaattgctgccattttgttaacagatatagtagtcaatcttactgttttctttttctttgaaataggctgctgcaaaggtatgttctttgttatctcggctctctgctcagggtagccatgaaatggctcttttaaaaatgtgcccagataattttgaaccatttcaaaccatattatgtgattttaatttattttccattgcattcactaactcatttctgggtgatgtatttaaaagactagacagaatttacaggtttaaaaagttacattaacagaaaatgtaggtgccagttgaaatactgtcaactggaagtgctaccagcaatgtgctagctggacaatgggacttgtcccatttttttgctgggtgacagctatcactgcctcagggaggctggtgccatttaatgcctctgataatcagaataagtaattgtggcttctgggtctgtaaagccacaaaatacatatgcaggcctattttaattgacggtaagtcatgaaatacactattttcgtattaagataacgtggatatgttatggaacaaagttaaaaattagcatgaatttttaaagtactactggagattgttggctttaggttcgtgaaccccattcctgcccccacactcctgttagtggggctaccagaggggccagtatgaaaagcactggacttacagatgaaagaacttgagctggaatcaattcgagtcacttaccttcgctacaggtgggcagaggagtcatcctgcaattttgttgtgaaaacagaatgagataatataaaatgtatttgaatacagtgaggtctgtacagatgctgaatctattactttgcagtaggagtcaggtgtggccccacttccccaccttcttacctacttgtatcttagatcttatatatattgatattcacttttggtggactaaggttgtctttgttgcaaacctggactctcttgtattcttgctcagtgtgtgtatgttaatgttagataaagaagattaggctggtgcattggctcacgcctgtaatcccagcactttgggaggccaaggcgggcagatcacttgaggtcaggagttcgaggccaccctggccaacgtggtgaaaccccatctctactaaaaatacaaaaattagccaggcatggtggtgcctgcctgtaatcccagctacttgggaagctgaggcaggagaattgcttgaacccaggaagcagaggttgcagtgagccgagatcacgccactgtactccagcttgggtgacagagtgtgatcctgtctcaaaaaaaaaaagcagaagattatttggaaagctatttttaaattattcttcaaacatatactaaaatagagaagacaacatgagagccaacagcataatgaaaccccatcactcagcctcaaccgttgttaacagtttactatctttattgctactgaaggcagttaaatatttcttggcagtccttttttatttagcatataccatcagggatgacaatagaaacaggtttcaaagtcaggtgaaataatgtttctctatatgagttcaccactaacttgatacacagtttatgtttatgtttatgttcttattacgttcgtgtattaaggcaacctttcatccctgccccctaataggtaactgtctttatttgttctgggattatccctcctccattgccctttttggaaagagtatggatatatttgtattttctcttactcataaagcagcacatggtacatactgttctgagccctggttttctttttttcacttagcgttgtatactggaactcactcaatgtcagtatacagagaattcccttgtctttttataactctgtgctatacgctgacggaagttcattcagtcagtcccctattgatggacacttgagttattctcagacttgtccattgttttgcaaaaatagccctgggcatatgtcatttggtatttttgtcgaggcattccaataaaaataagtaaattcttcctctcttgccttgaagatgtgcagctcctcagtaaccttttattctctaaagctctgtcctcatctttaatccctgatttaagaggtgcagctcttcaggccataaacctttcttcctgcctcaagtttttaaagctacaaaggaacctaagagatcccttgtgttttacagctaaaggacctgagagcaggaaacaaagggagagccggaagcccaggtctcctgttccctgcctggcaggtgatattctttctgttaaactctctttccctctgcctattattggccaggctgtcctccaggacagtgcttgccaaagtgtggtccatgggcagcagcatccccggagctcatcagcaatgtaagatgtcaggccctgccccagaggggctgagatagaatctaccaattactggattccctgggtgactcatgcagtcaggttggagaagcgctggactggtggctttctccagaggagcatgcaacagcggtttgcaaacagggatgatgcagttccttttcaacacgtggatttgcacttcctcctggtgcgctcctccagcctgcctgtcctgttcacaccagcctccccctggaaggggttcagacttgatcctttgggtggtagggtctttcttggatagcgtagccatccattcctgctgcatacattcaacacagccttcatccttcgccatttgtctctgatacttcatactccttttgtttgacaagtgccctagctttatttattttctcatcattgttgttaagggcctattgtgcttgctagtatacacaccactatgtaagttactagttcaatttatttgttttactgctgctgtgaggtgtgtccatgtgtgcacatctacctgtgttaataactgataatattgggcctcagtacatactttttttttttaagagacaaggttttacttcgtcacccaggctgaaggactgagacacacttgtagctcactgcagccttgagctcctggacccaagtgatcctcccaccttaacctcctgagtagctgggactacaggcacacaccaccacaccaactaatttttttattttttgtagagacggattcttactgtgttgcccaggctggtctagaactcctggcttcaagccatcctaccacctcagccttccaaagtgctgggatgataggtgtaagccgccgcacctggccctcagtgcatacttagatatacttaaataaaaacttaattgcaaattacttcttaaattatccacaaactgacttggcagtaaaagtgactacaagtagtgaaaccactgtcataataaaaataaaataaaagtctttattgttagatttagtatttctaatctcttacatttcagttttggaaggtaaatttttgggaagtggtggtaataatctaagtatgtctagattcagtgatgagagctagtacactgtaggaaagagttgagcataacaatatggaatgttggtaaatgtataggggttttctttttaaagacagctttttatacaaagaaacagatgatctttttttttttttctaaactatgttagctatacccaaattagtaaatgttaaaataaccatgactggtaaaaacattttgcaattttttttttttttactttttatataattaaatgaaattctccatttggtagttgatctctcagacaaattaagtcttgccagactgtctgagaagactagtgaatcagaccctaaaaacttgtagcatttgaaaaataacaactgtgtactgcaatttataagggcataattagagaaagtttttcagtctgaagatttatactaatcttatcaccctggttttagagaacccagttcaatccaactgctgtgaaaaagccactgcttttagccacagaaaataaccagtttcatagaatgacttataataaaaaattcaaccattttgactccaaaaacctagctggccgggcgtggtggctgacgcctgtaatcccagcactttgtgaggccaaggcgggcagatcatttgtggccaggagtttgagacctgcctggccaacatggtgagacccccgtctctactaaaagtacaaaaattacccagacgtggtggtgtgcacctgtaatcccagttactcgggaggctgaagcaggagaattgcttgaacctgggaagcggaggttgcagtcagccaagattgcaccactgcactacagcctgggcaacagagtgagactccttctcaaaaaaaaaaatgcctagctgactttatcatagatctgtctgtaccttgtaggcacaaatatatttacaaaataattaatggtgatttacttattcacaataagcagttattttgcttttggtgtatatgtgacaaggtggttatgtggagtacataaaggagtaaagtaagtccgttgacttcaagatgcttacagtctaatagaaaccttgaaatttccactgggcaaggttttcttgggattgctccaaccaaatgaatgagcaggcgtctaagtaaatgaaaatcactctcatcactttccttcacattatgttaactggtgacaggtcatgacgcatgggaattgcttatgtttctgagctttagtcttgtaaaaataagtttagatagtccatcatgttcttcacattagacactcattacataaaaggttttatatgtattgtagatctttctgaaggtcatctatgtgaatgtttaaaaaagaagcaagaaggtgctataaaaagcactagaggtcaaatggtttgcgagacaaaatgaaactctccagctctgaaatccaacagagtatgatgaagaaagggaaaaaatagatcaaaaaatggcaggggaggaactcggcatcaaaccagtgataaagcagaatgtggatcagatccagacatccagtagtctgtgagcatctccatatgggatgtttgggttgagagttcaacccatcaaatacattttatccataaccataagatattctaagatcgaccaagtagagtaagcaatgtagaatcaaaggtatcatctttattatgtcctatttgtgtttcctgcttttgaggttcttagtccttttaattaactcctaatgaactaatatagttttgtggtcaccagcttctagctagtacaggcacagttgtgggttggtaggagaatgagcagtaaagccatgagctaacacaccaagtaatctgttgtgttcacaaatgtccaaaagaataacagagattaaagaaaggtaaatacagccacctggcaaaaatatttacccttttaaaaatgatggaagttatatatagaagaaatgtttttggtaaaaatatttgaaagtttgttttataatcataagtagcttgggctattttgactagaggggtgtgtgtgtgtatgtgtgtgtgtgtgtgtgtggttggcagggagagaaggagggaggcaggcagctggtagggactgtggagtgtgtcagttgggagagggaaatgagatgattaagttagtaagaatagaaaacatgtaggaaggcggatcttgaaatttcagggctattcattagtcattagttgaagatttcacagagaaatggtagaaaccaccagtaattaagaaatagcattattgtttaaaaaaaaaaaaactcccaaaccctttccctggcattctggtagaatatagttttggtctaacccaggtcccctctcatttcctttcacatccccttggttctagccacgctagactgtctgggttgtctgtatatgttctgatgtttgttttcctctgtgctgttcttctggcctcagaatcctagtgtccttgtgcctccttctgcatatgtctggactttgcttagctgatgagatccagttcagataccaccttctgtacaatggcttccttaattcctttaatttctcttaattgcaataaagctatttgcagaggaatgaaagatgctcccctttgcgctgggtacaggatgcactgaaactttcagcatggggcgcggtggctcatccctgtaatcccagcactttgggaggccgaggcaggcggatcacctgaggtcaggagttcgggaccagcctgaccaacgtggcgaaaccctgtctctactaaaaatacaaaaattagccaggcatggtggtatatgcctataattccagctacttgggaggctgaggaaggagaatctattgaacccaggagacagaggttgcagtgagctgagatcgcaccactgcactccagcctgggtgacatagcgagactccatctcaaaacaacaacaacagcaacaacaacaaaaacccaaactttcagcaggagagtagcttggttcagcccagcaacatcggtttgaagattatatcaagttttccagtcaaatgtaaccagtttatggatctgtgtttgcacggggtctgaacctcccctcctcaggtataagctcttggaggacagcctgctgcttaaggtacaggagaattcatctttgctggacatggtaacgtatgcatagagatctggcaacagaacttaagatatgtgggagaaataataggcaaaaactggaaagagcacaagtaagagaagagaaatccgcagaagtgagaagtaacagaattgctggctgaggttggaggcatttaagtgtgtgggtgtttgtgggaggcatggtggtctcctgttccttgacctcattgggcaaatattacagcacgaacatacaggtaggaatcaattgcatccccacctgggcaccttcatcggcagttggggtacaccacttgctacagtgtgatggaataagggacgatccaaaggcactcagttctcccacccatcctgtgcacaaggaaaagacctttgaattgtgtctcccctgttgtcctttgcattgtgaaagtgcatattagttctcccatccactcttttctctttaagctttagcatacggttgtttgccaagaatggaatcagatagaatattttcaccaggaagtgaaatttaaagtgcttgaaaaagatacaaggatatctggaagttccaaccggcgccattttatattttaaccatgacaagtagctgtatatcatggaactttggaaaacagagattgttccatttatttttcacagatgaaaaccagagtgctgtgtggggatcaggaagagggaaatcaaccaaatgccttattttagagattttttttttttttctgggaaattggaaacagcgcttgtttatagccaatgcagcgtccttgaaactctcctacttacagttctggagctgtagtttcctccctgaagaatgggttaaggcaggcagggtaatatgcatagatgggagtgagagtggatggcctacagggttgttaacctctagtgcaacaggaatatatgaaggtacttgggctggtggtcctgtgcagaaccagccagtaggttctaagagacttgatagccgagggtccctgggccctgttccacctttttaaaatttctatgacttagtagcggcagtaccatgcccatcccccagtgatgtttggggtacagctgcacccttggccgtgcctctgcactcactcacgagtgtcatctgacatctggctcttgaccaggatctgaggttgcttaagcaggatccaggtcaggttttttgttcatggaaggtggaattttggacctttcccccaaaaagttgacataacttaaagagaagggaggtatattgagaccagcctggccaacatggtgaaaccctgcctctactaaaaatacaaaaatagctggcatggtggtgagtacctgtgtagtcccacctgctcaggaggctgaggcagagaatcagggggcggaggttgcagtgagccaaggtcatgccactgcactccagcctgagtgacagagtgagactctgtctcaacaacaacaacaacaacaacaaagagcagagtggtattatttcctcactggaacattaaatggttcctactaccaaagagttcctgttctaatgggggtttaatataatagtaacattttattcactgggattcactcgggggaaagtattcaggaacaaagtgacaaaattaaatataggacatatgaacattgtcattttggttctagttcttacaagggcttatggtagcaacccaaatagaagtatttgctctaactaacagataaattattagcacttcagttgtttacatatgagtcagagcatctaaaatttgttcccataagtaggttgagcctccttctcagcctgttgtcatagggtctaaaaatggaaacgtgagtccaaactctttccagatcataaaaataattctgaattagtagagcataaatgaatgtgattttattcgagtgtcattttcaagttccccaggccaggttgagaccttttaagtcatccttaattccctgtagggaggattaagaaaatagtagcagctttgcttctggccttagacagttttctaatgaggtcagagcctctcaccctgggagaagcagattcactttgccccttcagcattggtttttgagaattgctgtctgaagctattgcatagacaaggtcactttttaaaagggtacatttctgaacctggagaaggagtgggttctgaatgactggctcttctgattaacagagctgtatatcaagctgtgctgaaaatactcctcagatatattaggccacatttatgcatgagtgagctcactgtcgtgacatgggagtgaacctttgctgattcgagatcctggggtgccttcactttggaacactgattctagatatttaatagcagttttaaaattaggctaaatgtagtctgactgcaggattcattccagtgggaatttttttgtttgttggttagttttttaagcctgaatatgaacccaaacatgtttcccaaaatgtgaaatgaagagtgaaaacctaacaatgggataagaaagataatagataagagattatagttcaaactcggcctgcactcaggaaatggaagcaattcctccccctcatcctgcccccctcctcttcctccacctcctcctcctcccttacctcctcctgcactnnnnnnnnnnnnnnnnnnnnnnnnnnnnnnnnnnnnnnnnnnnnnnnnnnnnnnnnnnnnnnnnnnnnnnnnnnnnnnnnnnnnnnnnnnnnnnnnnnnnnnnnnnnnnnnnnnnnnnnnnnnnnnnnnnnnnnnnnnnnnnnnnnnnnnnnnnnnnnnnnnnnnnnnnnnnnnnnnnnnnnnnnnnnnnnnnnnnnnnnnnnnnnnnnnnnnnnnnnnnnnnnnnnnnnnnnnnnnnnnnnnnnnnnnnnnnnnnnnnnnnnnnnnnnnnnnnnnnnnnnnnnnnnnnnnnnnnnnnnnnnnnnnnnnnnnnnnnnnnnnnnnnnnnnnnnnnnnnnnnnnnnnnnnnnnnnnnnnnnnnnnnnnnnnnnnnnnnnnnnnnnnnnnnnnnnnnnnnnnnnnnnnnnnnnnnnnnnnnnnnnnnnnnnnnnnnnnnnnnnnnnnnnnnnnnnnnnnnnnnnnnnnnnnnnnnnnnnnnnnnnnnnnnnnnnnnnnnnnnnnnnnnnnnnnnnnnnnnnnnnnnnnnnnnnnnnnnnnnnnnnnnnnnnnnnnnnnnnnnnnnnnnnnnnnnnnnnnnnnnnnnnnnnnnnnnnnnnnnnnnnnnnnnnnnnnnnnnnnnnnnnnnnnnnnnnnnnnnnnnnnnnnnnnnnnnnnnnnnnnnnnnnnnnnnnnnnnnnnnnnnnnnnnnnnnnnnnnnnnnnnnnnnnnnnnnnnnnnnnnnnnnntccctcctcctgccccctcctcctcctcctccacctcatactgcccccctcctcttccacctcctcctcctccacctccccctcctttacctcctccttctctttctgcacaccccacccccgcccccactagggacagtttactcttccccctcctttcttagaatgccaacaactagcctgttagttccattacttacttgccttgtgactcataacgttttcatcttgggtatttttctttcttggtctttgtaaaaattctaagcatcatagagcatatcacctggagaaaagacctacgttcattatttaatgaaggtaaaaagtaaagaattgagtctgcatcctaagaaattagaaaaagatcaactaagtaaacaaaaaaatataaaaactaggagggaggaattaggagatgataagatttaaaagttatgtaaatccaatagctggttatttgaaatgaccaataaagtaaactctcattatcctaactcaggaacagaaagaaatcatcctaacttagaactagataataggaatgagaggccgggcatgatggctcacacctgtaattctagcactttgggaggccaaggcgggcggatcacctgaggtcgggagtttgagactagcctgaccaacatggagaaacccatccatactaaaaaaatacaaatttggccgggcatggtggcttatgcctgtaatctcagctactcaggaggtgaggcaggagaattgcccaaacctgggaggcagaggttgcggtgagccaagagcactccattgcactccagcctgggcaagaaaagcgacacttcgtctcaacatcaacaacaacaaaaaagaaagaaatagataataggaatgagaaaggagacacaggagatatcaatagactttataagaaaacattacatgcagccctgtggcaacacatttgaaaatatagggctgacttcttaggaaaatacaaattaccaaagttgatccaagaagcatggaaaagttgaatagaccaattactatagaagagataggaaagatgattaaaagttaccattgagaaaggcaccaggaatccatggatttccagctgaggttttgtttgtttgtttgtttttggagatggagtttcgctcttgttgcccaggctggagtgcaacggtgcgatctcggctcactgcaacctccgcctcccaggttcaggtgcttctcctgcctcagcctcccaagtagctgggattacaggcatgtgccatcatgcccagctaattttgtatctttagtagagacggggtttctccatgttggtcacactggcttgaaaaaatagaaaatttgagtgttatttttactcttctaggacatactaaaacatggaaaggttcccagttcattttataaaaccatcaaaattttaatttaaaaatctgatgaattaaaaaaataaaaataaagatcaatattatttatgaaagtaaatgtagaaatttaaaataatttattaacaaatagactcttgggtgcatcaaaacacgaatgcactataatcaatagttattttccagtaacaccagggtgattaactgttagaaactcatcactatcatcagttgttacacaatcatattgaaggagaggaatatatgaataagtcagtagaggctagaaacctatctgaaaaagtttagtagccattcctaatatagtacaatctgagaaagcgaactaggaataaaaataaattacttaaacataaaggccatatatgtgtacacaaacacacacacaccacagcaaatatttcctaaaagacaaaacactaaagccattcaattaaaattaggaatgagagaagaatcttacattttacaattagtatttaatattatcttagaggttcttgtgagtggagtaagacaatgaaatggtcatatgtctagaaatcgcaagagcatctagtaaaaaatctaaaatcaacagaaacaattgtcaaggaagctggataaaagataggtctctagaaattatcttttctgtgttttgaagataagcacctagaaatggaagttaagtatttctttcacaatagcagcagataacctaggaagacattgaactaatacctgtaaccttcttagtgaagaatgtgaaatataatctagagaaattaaaacatgtaatgcctgaatgtatcttattacaaaattaataagtaaatttcttgtgattccggttagaatttccaaagtggtgggttttctctttaattgaataaaataatcctgaagtctttatagaagaataaatacgtactacctgagaggagccaagacaaatatggaaaagaaaaccggtgagggcagatttggcttacaagtaatgacaacatgctaagaataagaagtcttcgtgatcaaagcaatgtggtattgatccagaattacataaatagttcagtggaacagactagagaatctaggactgtgtctcattaagagagtgaatgtataacaagatgatagttcagtactgttgaggttggtactggcataaccagttctttatctggagagggggttgggggaacagcacagacctctatctaatatcataatcagtaataagtcccggaatcttcaaacacttaaatgtaaacaagcaattcaacttttacaagaaaatataagaacctattttgtataatcttggagtgagggagaatggttaagcaaaatttgatacgcacaagctataaaaagagacacactttgaacatatattttatttttatttgtttattttttgagacggtctcactctgtcaggctggagtgcagtggcgcgatcagggctcactgcagccttgacctcccagactcaggtgattctcccacctcagcctcccatgtagctgagactacaggcaagactcactgtattagttctcatactgctaataaagacatacctgagacggggcaatttagaaaggaaagaggtttcacagtttcacatggctggggaggactcacgatcacgggtgaaggtgaatgaggagcaaagtcccatcttacatggtggcaggcaacagagtgtatgcaggggaactcccctttataaccatcagatcacatgagatgtaattcactatcatgagaacggcatgggaaaaacctgcatctgtgattcagttacctcccaccgggtccctcccgtgacacgtggggattattacagttcaaggtgagatttgcatggggacacagagctaaaccatatcagctaccatgcctagccaattttttgtggagacgaggtttcaccatattgctcaggctggtctagaactcctgttctcaagtgatctgcccacctcagcctcccaaagtgctgggattaacaggcatgatccaccatacctagcctgaatatatatttttaaacttttctgtggcaaaagatacgtgattaagtcatagatcaagaagggatatttgaaacagacatggggttactatctataacaaaaaacttacaaattgttaagaaaaccacagaggaaaaatggacaaagaatgttaatatagaatacacagataacaaatgcagacagctagctggcaaacctatgaaaaatagttcatttttgctagggaaatgcagattaaacaatgagacgttactttaaacccatcagattggtaaaaatagagaaaaataacactttttgatagcaaggctgtaatagaagtggcaagtggtattatttctcataatactgatggaaatgtgaattatgggcagttgggaaattgaaaagcagatgggcaatgtatattaaaataaaaaactatcatacctttcttctaagcaacctttgtcctcggttatttgtcttttagaaataaaaaatgtgtgcaaagtcatatgtataaggatatttattgtaccattatagtggcaaaatactgaaaatatgaaaacccatcagttgaaaaacggccaatttatggactgtttgtaccatgtaatattatgagagaactagagctgtatgagagttggctgtggaggaatttctatgagaacttgatgaatgagaagcaatgtgtagaaaaatgtataatatccagttctaaaagacgcattcctcctgtgcccatatgtgtaaatgtgtgagtgtggagaacaagatgaaaatgctcattctgtatgttaagcagggagtggggtggaggttaatgtggaatggtgggagagtggggtggcagggatttccaagtcactcaccagtgatgagtgttaaccacatccccatttttttcctatgaaggaagctgcaatgctgtggtttgaggttaaacatgctggctccttctcttaggtcttgatttggtttttgttgttgttgttttttttttaattctagtctgttcttgttttgctgtgctgatatcctcttagattttacgagcatattaattgtgagtatttaacattcttctttggtttattctgagaccccgtttgcctgccctttggcatcattggcagtttttggtggtctactggtcttcctgtttgtgcctctcgtttgcccctttttcactggaatgtgccaggttgaagcaatatgtagggcccggtgggatgggccaggaggtggcctttcagatgtggctcctgcatggccctgcttgctctcttgagctgcctgcacttcagtcttaggaccacattcctgctttggcctacatgaagtgcaaggtagcagtgggaaaagcagagaggaaatgaagcttcctgataaatcacctgatcgctgccccagggttagtcactctagcccccttggatctcttgactccatctcttgatttgtttcttttgaatttctggcatctggagaatacttgtacagcagcagtcccctggttttgtttttctttcaacccaagcccatcccatatctgttcatgtgatgatactgtgtcttattttcccaagattcttatgactgtgatatttagtctgaatcagagaaagagagagatagaaatgtacactcagagggccacttggatggaaacttctgttgatctctccaagccttagtgggatcatctgtagagcagggataataacagcgcctatctgttactgttagggttactgcaaagattaaaataggtggtgctcttaaaagacttagaacagtgctgtcatatagtaaggattccataaacattagctgctcggtttgtgtgtgtgtgtgtgtgtgtgtgtgtgtgtgtgtgtgttttgttgttgttgttgttttaaacgggatcatgctggaaatgatagattgcaacagagctttggggttttttctctaattaatagatctaggatgttttctgaggtgtgtcatgtttttaaaactctgtggtatttctgtttctttctttctttcattttttttttttttttgttgttgttgttgagacagagtctcactgtgtcacccaggctggagtgcagcgatgccatctcagctcactgcaacctctgcctcccaggttcaagtgattctccttcctcagcctcccgagtagctgggactataggcatgcaccaccatgcctggctaatttttgtatttttagtagagacagggtttcaccatgttggccaggctggtcttgaactcctgacctcaagtgatccgtctgccttggcttcccaaagtgctaggattacaggcgtgagccaccgtacccagcctggtgtttcgtgatatatctatgtgtgagggtttctgtagttaagttcccatagttgaattcctggttcaaaggacaagaacatttacaatgttcatagacgttgggaaattgccttctgtagtactgcactagtttccactggctgtagtggttgatgagagtaccagtttttccctagttcaatattaacccattttatcagtcttttcatcttcgacattatggaaggtaaaaacatctcattttatgtcttcagtcagtgatgccaagtatctcttcgtgtatttatatttccatttttatccagtgccaactcacatccttctgtcaatttttcctttgacctattaatttttcattgataagaattctttgtaaaatgggcagtttaactccccatctgtcatatgttttttctcatttgatttattgtatatcttgtatagcaccttttaattttaacattgtgtttttaagtgtcttttctttgttgacttggaaagctaacaactacttacagcataatttccttctgttaaaaacaagaaggaatttccccactctaattgtgaaaattatacatttttctaagtctgaaaaaaaatagaggaaaaaacagaaaaaacaacagaaagaacatcagtcactcttaatattttggcattttccttttagttgttttttaggagagaatgtatatttatacttcgcatcataacatagatatagtctattttggtgatttattccaatatgtaatatatgtttctgaatgtacaatatcctatttatcatatctgttaagtttgtttccagtttttcatttaagagagaaaggtactgggaatatctttgtgcaaaacaagaatttttttttttttttagtcagattctgttcctatgatacctccctggaaatgggattcctaaattaaagaatattaggatttaaatacttttggtatagattaccaatttgctttcctaacgtgtggtactagtttatgttgcaatcagcacaaagactcactgtgccatttatcatcagcagagaagagagcagccctgaagatttgggggaggagtgttcgtagagaggcacgtgaaagtgagtttgagaggtttgagaagtagccaggtcagtggggctggggaagggagagagttcatgggggagggctggagatgaaggtaaaggagccatggttctttagggctgtgtgggtgctggggaatttgcatttcctgcttaaggttgtagtaagtcagcctggagagttgcaagaaaggagtggcttggtgtgatttattgtagcaagtgagagtgacccagaggccagttaggaggctgttgcagaggcctgagtgagagaggatggtttaaacaccaaaatggtaacattcagaatggagaggaggagatggtgggagattaaatttggggatggagcccttaggatctgttgattgactggatgtgtaagagagaaagggaagagcagaactgaggaaatgtcctcttgaactggctgggggccactgagatgggacagatgcgctggggagcagtgcagaggtggaatcactgctccttttaggtctaaggcatcccttagatctccaagtggatgtgtgaagatggtggtagaggagaatggagctcaaaagaggggccagagtcatttccatttagatggtctttacagcctaaggaactggcagatttcactaaggttgaggtctttctttcctgtgaaaatgtgatcaggatcctaagtaacagccctaaaaattaaacattaggaatacaaggtttcataaattaggaactgtctgtagctgccagattctaaatgttttgaggatacaaatcttggggtcttttcaaatgctttgagcagaagaggtacatcgtattgtgtttactgaatggcatttaaagatgcaggagacctttcccccttcttgatgaaacaatttgcctttcagatgttttgttatagtgagttgattgtaggaccttatgaagcatgtaaaccacacatttgtaaggcattggaagaaaaagctaacgcgagttaggagggatttaagaccatgtgaggaaattcaagcctatgttgttatcaccaaaccttgcctgtgttatgtaaagatttttgcctgtgtcatgttatcttcgttgtgttcaatttattcctccccctccaagtgtcctagtttctcctctactgtagctggttttgaacaaaatagagaaacttgggtctcctctaccctcagcatctgaattcttctcatttggttactcactgtgttaaaataagtgatatagtacattcttagcagtttgtttatttttaattttattttttatggggctagggtctcgctctgtcacccacgagtgtggtgccatggtgtgattgcagctcactgcagcattataactcttgggctcaagtgatcctcctgtcttagccccacgagtagctggtattacaggtccatgccaccatacccagctaatcttagcaatttttaaataacttttttttccgactgtaacagatttagatattggaaaagataaaacataaagcattgatctacctgtagagccaaatagccacagggatataaattggttaccatttaattttatttccatctatatttggctatatttatatttatgtatatggaaatagtttatgaatttggaatcatactatgatattttttagaatgatgctttttaaactattttatggtaagcattttagtaaagctcgtaatgttatttttaaaaacgtacttttcgaaggctgcagagtatggataaattcatgatgactttttagaggaaaatatcaagatgatctcactaacaaatcctgagattaaaaacaaaagcaaacaaaatacaaaaactgaaccatctttggaatactatgaaattcagattttatgttcttaataaaatcctgttttgaatgaaatcagtcttcatgcttttcttattccttttggctatgttgcctacagttgaattaactgtttttatatacttcctttgctttgcattgaaacaagctgatccattgtgaccctttgtggtatttcataaaaccacaccctaaaaactgcccagtcttttaagtgtagtcaacagtattgagcaattttttgggtaatattgtcggaagtgttaggtgccaaccaacaatggcttattgcttacatttaagtgtaagcaatatacaattaaaggaatgtcatgactttttaacttcattttgaaatttgagtttagaaaaaattccaagggaaatgagcaagaatgaaagcatcctctcctactgccagacttctgggagacccacccctggtcttcccaggtgtctcttcagtgaccttgttggtcgttgagggctgtggaaagttctagggaggctgctcgtccctcctctccttttgcttattgcattctgcccagattataaaactgaagtatctgtcttaagacgccagcagctttttcttcatcaaatccagacacatcgaatcccccacaaccaagaattacccagccacaaaatgtcagtagtgccccggtaaaagaaagctggttttagacttagtctcagaacctggccatcttccatggattatcccgatatgtgcatccttgtctcttttcactatagcctggtgatcatggtggcagttttcattttgggacactggtgaggttagaatagcttcaggcttccctcagtgaatagtattgtgaaggcagtggtggtaacattgtgttggagctggtgtgagggttgaatccactctgtagcctctgtccctagatcatggcgctgctttgattgggccctaattttctcctctagacaaaaggaattgaactaagacttccagcattccctccaggcttaacattttttcatttggtgctgatggtcactgactattttccagttacattttaatgcaagtttggcagaagccgatttctctgggttagggaaaatgacataggtggcagggaggtggatgtacaccatttgtttgatcagtttgcctagaatggaggtggcagaattggagttggaaagatcaaatgtagcctttttttcccttccagaatgaggcttttctatgcatttttttgaggcatgagaacctcatgggacaaggcaaaagtgagcatactcaagtgaagtgtatggttatgggggaatggttattagaaatgtcaattgtctcaattttttagtattaattttcagagggaaacagtggtgtaattagtgttgtgattgtttgccagggcggtcgtaacaaagtagcacagactgggtggctcaactaccacaaatttgttttctcagggctctggatgtccggagcctgcgatgaagcaggattggcttcttctgcggcctctcttcttgacttgcagatgctcctctgggtcttcccaggtcatttgtgtacctgtgtccgtgtcctaatctcctgttcgtataagggcacagtcatattggattgggacccacctactaacctcattttaacttaattacctctttaaataccctctctctaaatacagtcaccatctgaagtattaaagacttcaacttaggaattttgggcaaatacaattaagcccatcacaatcaggtaacatttggtaggacgtgtagatgctttttatctttaagggaataggcaaatcgttaaaaataaataaataaaaacttgttcaacttgtttaggtacattttcttatagtgtattgtggttcttatttttttaaccttccagctagtgtgtaaattggaaacattgtagcttaatttgatagttttagacataatcaaagatgatggaaatcttgttcttaaatttagtctattcagcaacttgtgtatcctcaactgctgaagactgaaaacttgagatgttcctcttgttttaagaatttgactgaaaacgggctgggcacgatggctcatgcctgtaatcccagcactttgggaggccgagatgggtggatcacttgaggccaggagttccagaccagccttggcaacatggcaaaaccccaaaaatacaaaaattagtggagcgtggtggctcacacctgtggtcccagctattcaggaggctgaggcacaagaattgcttaaaccccagaggcagagactgtagtgagatcgtgccactgcactccagcctgggtgacagagtgagaccctatctcaaaaaaaaaaaagactgagaatggttggcactgtccccctgtctccaggagggtgaatgtttctagctgaaccctggtgcccacttgctcctctaagccttcagcagtcctcccagcctcaaggggtgatccgttcatcttccccccacctctggaaatcccagcgtttgaacgctggggggaactgcaagtctagtttacagggtttctcagctgagatgccaggaacacttcgcgagtgagcatgccaccacatttgagtgcatatagaaagttagctgtttgctacaactggggacacttcctattagagccgcatctgctggggtggagggctgcatgggttggagagtagggtttgacttcttccagcaagaggaaagagaagtagcatagtgcccatcgcaggcagagagcacatgtttgacttgctcttggaatttctgtagagtaagggtggtcaggttgccagactacccctcaaacgaggacatggtgctgctgggtcccagggtagagctctgctggcaccttcaaggccctgatttacacctaagggcacacaactgggatctgaaaactgggatgcacagtacagactgcagatttacagggcggggctgtctctcatctgactattgattcttttgggggctgtagtttgtatcatagttatttttgttcctgtttttttcccctcttcaagacaataagcttttggagggccaggaagttgtgttcccatctgccgagtgtggggcctcgagggccagaacctcagaatgtagaagctgagttagtttgtggaagggtgaagggctgacctctactgttggaaatgccaaaatctctgatctggctttaaataagcaaaacagccccgccagacatagagtcatccacaaaacctcatgacctctgttattgcccatcctgtgtggaagcccactgagaacttcacttgaagatgctgcaggaacaactgcagggaacctggagataaggccccgggtgatgatgtaagctaattgctgagctgggtggagctacttaaccttatggtaggaggtggagcttgacgcaacccccttttccaccaacaagcatttctttctacctgtcattgaagtgaatcatcagtataagtagcgagctgggcgcattccttctcagttgtgttaaaacttgctggtattcccccggtatcagcagaggtgtgtacgggcactgctttaaaactgggaaggaggaagacgaggccagggagccggagggtcaccaaggtagatttccagcagcgctagtccagctgaacactttccagccttgtttttcagcagctttgaggaaaagtataggtaagaacaaagacaccactgtatgtttgctatatgaatgcataacatctgttcttggtgtgagtttgatgttggtttaatactgtttttatgtcagcggcatagttctagcatgtaccaagattttcaattttaaatgctttttggtgttcacagttagctataattggtcaattttaccctccttatgcataaaaagaatgataggcaaagaatgagccttgaaaagaattgggatcagaattctggtcccctgttctttgcttcttaactttcttgactgtttagaaaaatgtacagcttttcttccaaaaaccaaagcaataatacttttatttttgaaaataatggaaaacagagaccgctgaagttctatgaatgaggttttctgttttagaaatcacaggttgaggaggaaagaattgtgttttccttcctgttctgtttcgagtctcagtatttctgacttagaaacctcctggagaagagggagataccagctctcctttgtttcaagtaaaataccatcttaggtcataaaatagtttgcttggagaataattcatggcttatatctgaatttttggttggtagcaacagaaatctttctcttcctcggtatgagtaatttggcttacatgatttagactaaattttattatattttttgtttgagaaaacaaaagtcaaagcccagaacatattcaactgagtttttccctcaggttttctatcattttcccacccttcctactcatacatgtgaatatgctgaatgattaacatgtgatttttgtttctttactgtctcatttcatggtgattcataaactgttagttaactggttatagtgtatccatatgttggcaaagcttgaaataaatttgagtgcaggccacaccttcgtattaatgagccgggttactttcagtaaagtatttctgatgtcattaagtgttaagatggccggaattctaaagacaataaaaatgtatcaacaatatgaaatatcaaagcctacagtcaaatctgagttattctttagtacttatttcatagctattctttaatgtttattctttaatacttatttcacattgaaaagtactttacacatgtttgaatgagatattgccagtgaaagaaacaaaaggaagcaaataactctataagggaagtgggattttaaagtatgtttgtgctggccccaggctggtgagtgagtttcattagcaatgaccaggaagagaaagaatgccacagtggtgggtgctgaccttttttttttttttttaaaccttttttaatgtctgtaaggaatacaaggtgaactttaattcttgtgggaatctagtaagatggaagtcaagaagagaggaagaaatgctttttatttagttaagaggaagtaaacatctgtattagttacagatgttatgccttaacctttttcattcctattgtttttatgaaaatttgcctttttaagttaaatgaaggttttctggagtcctgtattgcaactaaatgttgatttaaaacgacacatttgggacattttcttggcactgtggaatataatgaaaagatataaaatgaaggcaggtatgaaattatatgaattctgctacttgagtgtagaagttttattccaaagtggtttgtttggtggatgtggtgatggtggggggctctatgtacttattaaggcaagtgatgggacaggagcttttgtggtcttgacggttctgttgggatgggagggttgtttgggatttttatgtttcattccaggcaatgtttattttttcagcctgtacttcttagggttttaccaagtcagttttcatgtgaagccattttcatatcgtttctttcaccttgatggaaatcttttccttcttatgtgctttgagttaaatatgatgtagtgtgctagtaacatagacggggctttcctttctacaggtgggcttgaagtgagcctgccactcgctcaccttgaatcacggaggtttcagaggccgttggccttcagggcaatggcagaagcacgtgttctctgctgttttctgagtctatcttgactgcgttcccagtggcccagaattccccaagggtcactcgacacaccctcgtctacagtaaatatttgtgcttcctctgtgcctggccaggttttctcagtacccaggagcacaggtgggcagtgggatgtgggcaggcggtacccagattccctcccacaggggccacagggaggacttgggcgcttcctgccaagagccccctgcccttcagactaagtggaaatagagatccgggagtccagtggactcagtggagttccgtagaatacatggaaaacgcaccgctttcagtgatgtaagctgtcttgttcacttcacgattactcatctggcctgcagcaggcaagaggatcacatgcaattataaacagcctcctctgactaaggtcagtgactggaaaccctgtcacgttatcagaggtcatttggtcatagattcttgggcagaagccattgagagtcctgggggtgtgatctttgagcctttgccagtgctggggtttgactccttttagctcaattaactgggtccaggagtttattttggccgagatctgccatgctgagttgacaggcttgacactggaaggaagtctctaacttcattagaggaaatggcgtggcaggctttaaggcattttgatatactccactttttctctcttgccctgttttgttgaggttttcagggccataactgtacctgaggttaatcagtgagtgatctatctgaaaggaatttgttctctttgggcaccgtcctgtgtggtattatatttgtataactatttagcttaactcattcaaaaggctatttaagtcacttgtcctgttcattacttgaaaacaagttgtcttctctttattcttttagtcagttaccaaatatttcctaagtgtctcttgtgctagacattgaggggcactccttctccctttcacttgtctgtttttgttgagctacattttttccttaagtcagattgttcttttcctgttacttttgttttcacttgatttgtttatttatatttaaatatgtactttaacagtcttgaagcattggtctgaatgaggatggtgatcagattgggaaaatgccccttaattttggtttaaaaaaatttattttctttaaattatttgtttattgataggggccacccactccaggtgagtggtttctctgtgtgtatggcagaggaatgctctgtgtctggaaaaaaaagtaacttagcttgaaatattatgaaagctgaagagtacaaatgtcagagagaaaggggtattgggggggaagagaatgagaagacaagacacagtcagggccctgtcacccgtgtggaactgcaggtccctggagagatgatgcatttatccctttttagagatattgccattaaaagttgatcttgagcatgacacagaactgaaagctttgatgacaaagccagcatctcagtttagcaataaccaggttagggaaaaaaccccagaaactcaacagtgagattcagctcagcaatgtgggcggggaacccactgtcccgccttgggcagggagcagccccagccgcttcatctgcctgatgctgggttttatccgcttcacaattaaatttcctttttgttatgcttgcgcacatctatatttggctttgcttcttattttttaagaaaggggagaagtgtgggcaaggtaaaatacagcttgcaagctcccaaatggcaaatgcaccagttagagtctaagtggcctcccaaccttaaggtgaaattcatttattcagcaaatatgtaccaagcccatcagggaccactgctcgagataccagtgcaaatagaagaggccaagggcacattattaggtccggagccagtggcctgcacagccatctgtgaccacctacctctctgcttgcagggaacttcagcctggtggaggagacccataatagccaagtcaactgataatagaattagtagtagtgttgagggacataaagaaatcagggtaaggccatcacaattacatgggtggatgatcttttataaaacagcacagttttgttttcttctgccatggtatctcctaacattttccagtgtgtctacttgcagttaatatggaagttgcggctgacactaggttagtggttaaaagaaaacaagaaaaccaacctttagaaatctttagaaacatcattatcatagaaagctataaactcttatgtatagaagggtaagtggccattgatcttggagcagaatgaatggatatttcctggaaaaaaatatttccactcatcaaagatactcaagtctcttctcatctaatcaatattggaaactaggaatatccacgcctatggaatatcctcagagagaattaattattctgccctctaagaggtatagtagtttagacttagaagtaaaggcctgaacttgaggctgcaccattgaaggcaaaagtgccctttatctcccagctttgtcatttgccaaatgcaattgtgttaaattaagtgacctccaatagcagagctctatgttttctcccctgacccccaagtcaaaattgattatagtaatccatcaaaccaggcctggcaaatgatgttttgcaactaaaggataaatactgagggggagggacgaatgtgaacgcatatgcagagcaacacagtcatgagaccattctattacttcctaaatttcttaaagcttttctgtcttttctgagcttctcaagtgagcaggggcatgagttcctgtgttgtgcctggggacagggaaggctttgggacctactgtggtcttaagtctgagcagtgctaatagcctcggctcaccaagtgctgggcactgtgctagagggtgtacaaacctctcatctcatgaggcctcactgctacagctgacagagatgacatccagttgtttttagttgcacatggcagagctagaaaacaaaccagggtgtgtcagactccagagcgcatgccctctgtgatgccgctgtgttaccctagatcaaatcaaccaagccatccgttaaaaaaaaaaacctgatctttgtcaaatatgcaattgttatatttttgttagagtctgcctctccagtgaacgatattaatttccttcaagtggctactcacagatatcacaaaatcagaaagctgcctaccctgcagcctgtatctgcctccacgtccccacatcagtcctccttgctgtgcttcttgtctctttagtttttatcatcttctaacactgtgaactttagtaatttattctggattgtttgctacctgtctccccttggtaaaatgtaggctccgcagaggtagagcgttttgtctgttttcttcactggcatatctcaggtgcctaaaacaaccatgccagacatgtagtggtgccagtgacaacttgttgaatgaagaaatgggagaaaaaagcagaccccggagacttaggagggtctgtgtgagggagtctccaggcagtcttcctgggggtgtcctgaaggacctcctgatcgtgattttggtcagtgtggaggctgtggtttcttctgagctgtcagtatttggaggtgagttgtctgcaggtcacctcatcccacctttacacattagtaaaatggaattcgctgggtgattcttaggactgtgcggtcagtcgaattaccagacgtccctgcatgctctgtctaagggctggagtctgctttccttgcttctcttctagaaagaggtctgtccacaagggattagcctcgcgaagttcctactgttgttcattgacccagtgagtgttttacccactgtgggtttttcctacctaattgcccctctggttttcagtgttcaacatgctgcagttacgtgttctgctgtggttttacttagcttaatcctttattaattgcctcttgttcaaactccctaagagcagattatccttctctttcagcttctgctccattgctgttgaacttttttttggtcgtgacatcagaaaaataaccaagtgtgagtctgataatagcaagtaaggctattttatttctatccaatttaccccaaatttgagcagtattacaccttaaaataatagagctggctcttgcccagcatgtgaaaagtgtatgcttcacgatggacagatattttccagtatctacttaccataaatctcaagatttaccctaccccactccagccattacccccatgtcccatttgcctaacctaccctagggccatctcagtgccctgtaaagcaacctttgttgcagacccactgtgtgactggaatgtgatgcacacaagtgaccaaggcatggccctgttcgcaaggagcttccagaccaatagcagaaatggacacataagtaaacaactgcgctacttactgataggcttctgccaacaggagtggagcttgagggccaggaagccttcccagaggcactggagcttgttttaacgttacgtgcatgccaggtggggggcaggacatttctagcagaggagaaagcatgctgtgctctgagaactaaaagtcatagtcactccacttggtgacatgtataaggcacatggaatagggccagagctgggcagaccgtgtatgccacaatagttcgttgtaggttacaaagaaccagcgcagagtgggtgaggcataggctatttgattaataatttggctgcattgacaagatacggaaaaggcgaggttgggactttccgtgaattttctcctcaaggtgcttaatcagtgaggttgggatggccggagggggccctcatttgcttgcctggtgctcaagcctgaggtcctggcctttaatagtcagggaggtctgtgtggaggcagggtgtgagccccctccaaggaaagctgcagtgtgaaaagaggcccaggatgagcgttggggagtatccacatacaacttgatattcctaaagtctcagttctttatgggaaagcccatgcactcttccacacttggaattctttgcaaagtgagtggtatttgagcttctttagagtcttgctactcccaccagctgtactggcatcaccagggagcttgttagaaatgcagattctcgaggcgcggctcacaactacccaatcagactacattttaaccagatcccaggcaatccctgtgcacgtgaagtgctagaacactgctctgcggtaaaacgactttgctaaccatggaagagggtgatttttttcccttttcctttggtgttttttataggacctatttaccttttagaactttttcagaattatggactgcagaatatatacagtgtcaatgtcattagcaattcattagtgatatttggctagaatacatagttgtttccacacaaatgccatttcttacattgagatggcacatgtctggttaggacttgggctcatttgtaaggagccacgctgcaggtaggcatgctcccgggacattagttgctcaggtttcaaactgctgccccagcatagcagatggcacggtaacaaagtccctgtgcactctcacattgcctgcggtgatctatcacacattttgtcccctaataacctagctgggggggagctcatgtctctgtttgtgctaatgctcgctgtatccccaagtggcagtacttaatataattgtcattgctctttaatattatctcattccacgtcagctgcacaaaaatttgaggttaattacaatgaatgttttctcaatccttgttattgagagctgtttaatagtttattttgtatgtgaagattcatatctagattgaggcttatacaacttcatttaaagacagctttttcggctgggcgcggtggctcatgcctgtaagcccaacactttgggaggccgaggcgggcggatcgtgaggtcaggagatcaagactatcctggccaatatggtgaaaccccgtctctactaaaaatacaaaaattagctgggcgtggtggcgggcacctgtagtcccagctactcggaggctgaggcaagagaatcccttgaacccaggaggcggaggttgcagtgagccgagatcgtgccactgcattccagcctgggcgacagagtgagactctgtctcaaaaaaacaaaacaaacaaacaaaaaaggaaagctttttcaggttggaaaaatatcaacagcagacatgaaaaagcatgaaaaatgacgctaagaatgtaagcaactggaaacaaaaattataatggtgcatagtgagctgaagatctatatttaaatgtgaactcccctttcagtttataagtgattactaacagcctcatcaggtttctggaattaaatgttttattatttcctcccaaagttagtcctcaaacattagtatttcttgtgttcttttgatttgaatatttgtttttaacacacaaggatatcaactctataagtcagttaatatgttcatgcttttagttaatcgaaagtggcttatgatttcagtttttggtatcaggtgatgttgcggaagtgaggttcactgtgaagcttcttttttttttttttttttaatcattttgttgtttctttgagtgtatgtgagcttataactcaagacactatgtgaaatgaccctgtgtttcctacattatagaaaagaggaaaatgaagcaagttcaagaaaattagatttatgtggaaaataaattctgcatctagttattcattatcaggtatgagattacaggcatgagccactgtgcctggtgacctcatttgaactcgattacctctgtgaagaccctgtttccgaagaaggtcaacattctgaggtgccattgtcaggtatgaggtaaacacactgagaataccacattttggcaactcagacaagactattttccaaacatgtaaccctgggaagaaggtaacctatcatagtgtgtgttaagaagtcaagcaaccaagaaatgttaattgaaggcccgttttgtacaaggttgcatggaaaagacacactagcgtaagacatggacagtggccctgagtgacgtgcagccggtttaggcgaattaagatttacatacttgaaaagggacaaacaagactggacgtggtgactcatacctgtaattccaacactgtgggaggtggaggcaggaggatcccttgaggccaggagtttgcaaccagcctgggcaacatgggaaaacccctgtctctacaaaaattaaaaaaaaattagccatgtgtggcagcatgcccatagtcccagctactcacaggggctgaggtgggagaattgcttgagcccaggagatccaggctgcagagattgtgccactgcagcctgggtggcagagcgagaccctatctcaaaaaaaaaaaaaaaaaagaacagaaaaggaacaaacaacagacacaagattccatggaaaagggagtggtctaagtattcagactgtaggaattcagagagtggagaggctggttattatgggggtgcttcatcctggggagttgagggaaaggaggtgctggctgcctggagcctggaagaatcaaagatttccaaggccatggggggaaagcatgaaggatgagtgaatagacaccagggctgagcaccctgaaaactgtgaagatactagattgacctgtttggaaaaccaaacagatgtggctgttattgacaagtggttttgtttttgttttgagacagagtctcacttggtcgcccaggctggagtgctgtggcttgatcttggctccctgcaacctccgcctccaaggttcaagcagttctcctaccccagcctcccaagtagctgggattacaggcatgagccaccatgcccggctaattttttgtatttttagtagagatggggcttcaccatgttggccaggctggtctcgaactcctgagctcagatgatccacttgccttggcctcccaaggtgctgggatcacaggcatgagccactgtgcctggccaacaagtggtttaaattggattctccatttcccacctaatagaaagtcggaagcatagggcaaaagtaaaggaaggaccctgtgttctgctggttaaatataacagaggtctgactccatggctattataggagaggtgcattttgttctatgtaaattatcttgatgtgtcccctgtgcctttaccccatgattatttagcacttttttctccacggtcacagggacagggagaaacatacacccataaaacagtgtcatctagaggcaaaaacttgtaatgctcaagcatgtgctctgacgaggtggggcagggtgtgtaggaacaacactctactaattattacagagcttgctctgcactctctgtagaagtccttcaatatccagtctaacacacacagtaacttaagagaggattttaaaaaatcaaaatgccctcagatttgtattggatttaaccaggctgagatccctgagatccaaatataataatgtgtcctttttggatgaatcagacacaagcaaaaatctccagtgtgtgtccagctttagaggtgtagtaatggattccacagttcacgctggtgggccagccaagacttttaatgctgatgtgggcttcattctttctataaactccctttcttcttgatagtgcatgggcccaggggttccaaacatgggtacctgccgtaattgatctgtgtaaccggagaaaatacatatcctatggcacccttgtgtcgggatatagggggcatcaccgtaatgtggctctttttctgttgattatagttttttctttctgtgatcacacaattgttttatcctcgcttaaaaaatttcaagaagtgcagcactcagaataacagaaaagtcaggtgtctggtggtttgtttgcacatttaatagacttgaagataaactctctaaacatttattttgcaagttgtttttctgagagttgaggggaaacttttgccctttggtctccctgaggaattctaggatttcacaggtaggcgtgtgttttggactgcaggctgaacgtggttggcagggtggcatgaggagggcacatattttaagcgttcttagggcagatccacgatcctttacctgccatttctaagtccaaaaagccctgaaaaccaaagacatctttacaggtttgtaggaaattgatttgagagcaaaacctgatgtgaacagatttgagagtattctaggcatcttgtataacacttcattcaatgctttgtgcctcttgctgcacagatattaacattcacttatgggccctgccccatcccctactggggatgctatgcaataatcagaataatcaaactaataataataataataattggaataatcactgagtcattgtattagtccgttttcacgctgctggtaaagacatacccaagactgggtcatttataaagaaaaagaggtttaatgtactcagttccacatggccggggaggcctcacaatcatggtagaaggcaaaaggcacatcttacatggcggcagacaagagagaaatgaaagccaagggaaaggggaaaccctgtataaaatcatcagatctcttgagacttattcactatcacaagaatggggaaaactgtccccatgattcaattatctcccactgggtccctcccacaacatgtgggaattataggagctacaatttaagatgacgttgggtgggaacacagccaaaccatatcagttatctttctaaagtgagacaaaaagtcagaattctgtaacacattttttcccaagcgtttccaaaaaaggttggctttaatggagtattagtttgctaggcctgccatggcaaagcactatgaactaggtggctaacaacagaaatttattttctatcagtgttggagtccagaagtctgaaattaagagtcagcaggattctgctgtctctgagccctatgggaatatcctttctggctcttctagtttgtgatgtttgccagcagcgttctctgttccttggcctgtaaatgacaatcttctcgttgtatcttcacatcgtctttcctctgtgcctgtttgtttctgtgtctacctttcccctgttcataagaacaccagtcatattggatcagggctcaacctaatgacctcatttctttccttttctttccttctttctttctttctttctttctttctttctttctttctttctttctttctttctttcttttcttttcttttcctttctttttttctttctttctctctctctttctttcttctttttctctctctttctttctttccttccttccccccttcctgcctccctccctcccttccttccttctttcttttaaaaatatttttcttttttttcccttccttcctccctcccttccccccttctccttccccttcctccctttcccccttcctccctccttctctccctccctccctccttccctccctcagggtcttgttctgtcatctaggctggagtacagtggcatgatcatggctcactgcagcctcagcctccctggcctaagcaatcctctcacctcagcctcttgagtagctgggaccatgggtgtttgccaccatgcctggctaagtttaaaaaaaaaaatcgtagagatagggtctcactatgttgcccaggctggctttgaactcctgagctcaagggatcctcctatctcagcctcccaaaggggcgagattacaggcatgagccactgtgcctggtgacctcatttgaacttgattacctctgtgaaaaccctgtttccagagaaggtcacattctgaaatactgggggaacatagttccccatcttataagatagagaatgggtcaagacgagcagctccattctttgtttgtgtttaggccagtgccaagttcaagatcttgcctcagggctttcctggtaccactgggaatgtgtatcagcagcagctgtgtcactgaatgggtgtcacctggggggctgcctgttcagacattagaagctgccacatcccctgttaactccatgtgagggaggaatcccttccctccgacaatttcgcctgtgagaatcaagtcagattttgcagtgagaactgagctgagtgtagaataagttcccgaggtacttctggcaccgttgttactcccccaccgagaagcccagaatgttcccaggtgtgttcaaagattgtacaggaagggcttaggacggtgcttggctcatataaacactcagtggcaaagaggttgatgcttaagtacacaggaagtgtttaccagtacacataattgtataccagtgagctccaccattcaatttactgtctgtccggtacattgaccctgtgaggcccactctcggtgtggcactgctaacaggttttattgttgcttactcacttgaaaagtgtctcccttggctagacctttgtcctgagcactggacacacataggtgctcagcagcgtccctctctgcaatgcaaaagggataccgtgtgcctctgcatgtcagctctagtcctggcatcccaggagcatacggtgacagtggaagtgaagcgcaagccgagtcctgggaaccaatgtctgccagaattaattaaaagtaagcatctttttttccctggttagttaatccaggatgaattccctgagtagttcctgccgttagaacttgctctcttttttagttagacacagctcggtgttgcctccactttgacatcacgttcatagttcctgtgcttggccagaactgttttcagttgcaaggacatgggtgagactggtcaaggaattgactttcagggttccaagggaataattagttcagaagtctgtccccatacttgttttccagtacaatctgtgtctctgtgggtgtttttttttaaggctgtgtgctttataaactggagatagaaggagccagtttattataaaaaggataaaatataattaaacaattaaaagtatgtctttatagccgggtgtggtggctcacatctgtagtcccagctacttgggaggctgaggcaggagaatcgcttgaacctgggaggcggaggctgcagtgaactgagattgtgccactgcactccagcctgggcgagagagtgagactccatctcaaaaataaataaaaattaaaataaaaataaacataggtctttggccaagtgtagtggctcccgcctgtaatcccagcagtttgggaggcagaggcaggaagatcgcctgaggctaggagtttgagaccaacctgggcaacatagtaacctcgtctctacaaaaaatttttaaaaattagccaggcatggtggtgtgtgtctgtagtcccagctactcaggaggctgaggtgggaggatcgcttgagcccaggaggtcgaggctgcagtaagccatgatcttgccactgcactccagcctgggtgacagagcgagaccctgtctcaaaaaaaaaagaaaaaaaaaattatgaagtactggttgggttaacgtttcttcttctaaccatgagggaagtaggtgggctgttctggtgactcagtgtcctcccagactcactcatgagaggaagtattcatggactgtggtgatcttgtcttggaatttttttctttgcctcctggcctcacagccgttccttttcttttacacatccatgaaagggagactctaagatcttccttgccaaggttgttgtagggatgagcgatgatgtctctgaggcaccaggcacggtgctggcacccagaagctgcttaatgatcctggaagttatgaccattgctcatagtttttcctacgtttcagatcatccttaaataattgtcattggctgggcgctgcggctcacgcctgtaatcccagcactttgggaggccaaggtggttggatcacctgaggtagggagttcaagactagcccgaccaacatggagaaaccccatctctactaaaaatacaatattagcccggcatggtggcgcatgactgtaatcccagctactcgggaggctgaggcaggagaatagcttgaacctgggaggcagaggctgcggtgagccaagatcatgccattgcactccaacctggacaccaatagcgaaactccgtctcaaataataataataataataataataacaacaataattgtcatttatcagcttcttcgagctcttaatatatatatcgccacctttcacaaaggcaaaatctgcattagaaacactgttgtctgattttggttcctctggaggaggggtagacagtctttttgtgggcagggtctgtgtctgtttacctctattccccgccccccactttggtgcccaccacagtcccttgtgtatggtggatgctccttgactatctgaggaataaaatcaattgtgaaacagtttccaaaaagggaacagtttttgtttccccgtttccttatagccttgtgagttgctatctctcttggctctattattaataacataaaagaaagagctgttttcttaacctctggtagttgcacatatatggggaaaaggcataagaaaatatgctggcaataaagacaagtcacagattgtcattttctttggtgactgaagggatatttcagtaatttataggtgaaattttcctttttgtgacttccactgaacaacatttttactaccaaaagataagggaacaaaattttttaacaaactatttaagcttaaatatttaaacatttttattagtcaccacatattaataaaatatttttattagcacatattttattagtcaacacatgtgtacacagctctgatgatctctatgtagatgcctatataaatagctatatagatatcatcagagctgtgtatatatgtgttagagatagatgcacatacagttgccccctggctcccaggggtctctgtgacccaaggttgggaccctcaagtgactagttatggatggcaaggggggctgcaaggccagagttggtcctggctagagatttcaagactcgagtggctgggaaggttttagaatgcaggtaaaccactagttgctccaaacaacaaaaccatcataatggaagcatccaaaagtgtgttcttcggcagcttcagagactatgcctaagcaataaagttttaatgtcttttttagctgcttaggtgaagaatgcatttgactgtaatctaacccattaatctcttatttttgctggaaaattgtacatatttaagagtagtggctcattgccagtattggtgatgagtgatatattttaaactatgcttcatacctttcagtaaatcttgggctgaaagatatgtacgttttgttttcaaaatttttcagtagtcatctatttaggtcaattttctgggcaaacaaaatatttgaagccctttagggtttgttattgagatgtaggctggccatgaaattacagggttcagtacctcattgaagtgtatatgtaactgttattagttttttgataacttttttatactcataaaagtagtacttgcttacagtagaaacttaataaaaaccataaatggaaaaataaaccattcgtaaacatcatatagagagaatgactattaacattttagcctaacatgattttaggggtttataatattctagtatatgattgtaccataatttatttaattgcttcccaattattggactggaagtttgcttctaattttttcttattatatatgatgctgtaatgagtaccttttaccagtaaatatttacctgcctctctgattacttctttgggattaatccttagaaataaatttgatgaatcaaagggcatcaaccctttgaatgcttctgatacttctgccatgttgtttcccagaaaagatataataattattccttccagtagtagagtattaaatgtctgcctctctttagaaagtattaccttttttcaatctttgacaatttgttagataaaaacttcagtttcaatattattgcatgtattcatggatatttttcttctcacacattctagattttttctatattgtttataaatgttttataagtgttattactttattgaggatagaaattattatgtaacacttgatggtaacagtaaaagtggaaaagaatgaggaaaccttcaacaaaacaagttgtcattaacaaaacgggttttgcaatgcaactttctgtgggttagctaaatctttagtgtgtcaggtagtcgaaagaaatttgctgtatagtgctgtgaaatatgctgcatccatgagccctctgctctttgcccatagggagcaaagacacaatctttttgcaagctgtcccagtgccatattgaccatcttccttttacagcaaaaagttattgcttcctttggttaaggttgggacacccctctggaggcacacttgaaaaatgaagacctttctcgttgttcttctgttatccaagtatcttggaagaacacctctatagcaggtagacaaggcagggtgtcattgcaatctggctgcagactgaatgtaatcccccttgacattttgccccttggaggcaactcctgccctcccctctccccttacgaccctgcccccttaaaatatgtggagctcagcaaagactatttattctgataaaaatgagcaaataataggtgtgaaagaacatggaacacttcagtgaatcaaatggagaggattaagcattaccccaataatgattggtcaggacgactgtccctgtggagtgtgtcccagaagggttgagcaatggagcaaacccagaaaatctcattctcaactctccctgacagatgacctcgtctgcgctgtcttttgcttcatggtgatgaaggtggaacaagacccttgaataagatttccatctctgaattctttaaacccatttgagatcagtgcaggcctgcagtctctctattagaactggagcagaggcccagaagagagaactgaattttcagcactggattctatgttgagaatgaaagagacaataattgaaaagcttttctcttggaaattttgcaaaatccgagtggatttttgaccaggatttcttggtgacctctcctgagagagcaggtgcctgaggatttcctgctgagtatcttggcatctgtcagactccttatgacttcattttagttcagggagtctgtttcctagccattgatttcatgcacaattcctggcatgtctcatatctctaaggtgatgtcacccttgtatttttttttcagatgtaatcttttatgtgacagtgaggtgtcttacttgtgagtgaacagctagaacctcccaagtggtttttcttttggattttgtttactcagtgaaaaatactgaggaacctgagatccttcagggtgcattttggtgtctgcccaaccttgacgtggatttggaggccaggctcaatgctcgaacttcttgttggagtggcactaaatcattaggatccctgaggacagacagttcaggccatcattatttggtaggcccttgcacacttacacacaaatgcatcattatgaacatggagcagaagattctagggccccgtgtgtaatggcacaatttgtcaagaggcctgagacctggagttggcatggattccctctcctcctgacccacctacctgctacattcagttggccaccctgttcttttgagtccacctttggatgagtagtcagtcctttctgatttttgccacctctgcattcagagctttcttattctttggcgcggaggccttccgttgggtcccactgcctgctgtcttatctccttctaatgaatatgatcatgatttttctgtatttagacaactccacgatgaggaggatgatggcggcagctaacatttatgtatgtatgtatgtatgtatgtatttagagacagattctctgtcacccaggtgcagtggtgcaatcttggctcactgcaacctccccctcctggattcaagtgattctcatgcctcagctccccgagtagctgggactacagatgcacaccaccacacccagctaatttttgtatttttagtagagacgagattttaccatgttgtccaggctggtccggaattcctgacctcaagtgatctgcccaccccggccttccaaagtgctgagattacaggcgcctgcctccacacccagccagcagctaacatttattaagtgctcactatactcctgccaagcactattataatttgtcttctaacaggctttttataagggaagtgctactattatacccattacatagatggtaaaactgaggcacagagaggctatgtaagtttcccaaagtcatgtactaattgatgaagacccagggtttgagctctgcaggaatggccgactccttgtggtttgagcctgggctccctctccatctgtcttttctccctgagccctcctgactgcagccatgccagactttttaatgttcggaaccccagctccagcctatcactggagctctgcctgtgatctttccacctcatgcctcccggttctatgtgtgccttcagactccatctggcagtggtatctggatggaccagtgcatagaaatcacatgagacactcaataaatgtagactcctagtgattctgactagcaggtctggggtggggccaggtacccagatttgcacgggaagtcagggaccactgctgctgactgcttttttcctgggtgcttggcacactctgtcacaatcatgttttcatttctctatgttccatttcaactggatagggacagtgtcttttgtttctggaacctgtctcttttcttggcatatagtaggcactcaggaaatagaaggttgcttgaatcctagtaccagtttactatctccttggaaagactgaaaggtagaatgtgatgtctaagcagcttcactaagcagagaaaacaaaaagtttgcaaaatagaatttgccttttaatctacatgttcttgcgtagcattgagcttcctagagagtcatattcatgctagccctgagttgtatcagcagcagccactagaacggtaacttgatgccaagagtgaattctgatgagcttcattgtgagtaagagtcccagtttgatcatctctacccagatcccgtgggacctccacactgtatgaataatgaggaggcgtggaatacgtagcatgctgcagttggccagcacccagtgtgtactgtgaggtaatcagtgtcaaatcagtcattgtagcaggagttgggagtcaaaaggagcaacagagaacctcacacgtctcctaagagaggaagcaaagaacagttaccttggctgtcatttatggggcatttgtattgtatgtttggaatggtgctgggtactagtattaatacatgattttctctggtctttgcaaaaactgcctgagttaggaattgtcattcccatttcattcatgagcaggctgaagttaagagtggttaagtaccagctgaaagggaggaggagcctgagagcaatctgggcacccgttttccccctcttcttatttatgaatgaatgaatgagacagggtctcactctgtccgggtctcactctgtcgcccatcctggagtgcagtggcacaatctcggttcgctgcagcctccacctcccaggctcaagcagtcctcccacctcaacctctgtggtggctgtgactacaggtgcatgccaccacacgcagctacattttttttgtatttttttgtagagatggggtttcgccatgttgcccaggctggtcttgaacccccgggctcaagcgatctgcctgcctcagcctcccaaatggttgggactacaggcgtgagccactgcgcctaaccctctcctcccctcgagcttacatcctactgtcctgtagccagctccaagatgttggcctttggttctctcttcaggctgaactctctttcagggagtttcctaatcgatcttccatagagttgatcataccttagtacctacctggatgagcactcaagatgttacatattcccacctgacttctttattactgctggaagatatggtgtcccacacctaagtatcccacccacagtccccagctgcatgtgtcgattattgtgagctattcaagggatacagactgaggtaaatgaaccaccagtggaagaatgtggatgttctattacaggaaatgcttagctctttattgcagttatataatagccggcaatcatgatagctgaggggcataaaaatgagagcaacagagtttatggtattctttataactgtggattctgtatgtgcgtgtgtgtgcacgtgtgttctgcatgcatctccatggcacattatctggaggtaacatgatcatcaggccttgagctcttttataagcaatagattgtggctggaaattgaaaatttagtttctgtagctagaaaatactcttttcaaatgccatctagaacagtagttctctgagtgtggttcctggatcaggagccttggtatcactgggaatgtgttaggaatgcagattcttgggttctaccccggattgaattcagatttgggagcggggcccagttatctgtgttttaatcaccccctcccccaggtgaatctgatatgctaaagcctgagcctcactcccctggaaagtgacgcctgattcatctgccagcccatgggcacccattaggaaggtgcttatgggagctttgacctgggctaggtgccggctcttgatccatctttttctaaggctgagggtgtccatagaaggagaagtaggtgcatccgcttagatgttatttaaccaaataaaggtttacagcttacagaaaagaggcaagattaactaataccttccaaaccataatgtaaaaaaaaaataaaaaatatttactcataatggagtataactgaacaaatcatgttgctaatttttttaggatatgttttgtagcttccattcagatacatcttatgggtaataaatacacacgtgaacacacatatgtgtactaacaatatttttcagacttttgattttttagatattgagtatagccttgttactaccaaacttttatcatacttccttgtgaaaggatttcatggcatatttattatttgaaatatcaaatagaaatcagtacagtctcagcattttaagatacttgatgtaatctttggaaatatcttagacattgcaaaataagggttaatagtcatagtatagccactaacgggcagttctgaaattacataaagttaatctgatgaactgatagcaatcagtttttggctatacataactagataagtgagaatttagagattgaatacatgagagccctttttatgattttcaggatctcaagtatgaagcaaaataaattcttctataccctaaattcttgcaaagtgatattttgattagatttgagctaccccagggctagcaatacttgaaagtgtgactagacttaacctcttagtagatagtccgcagtaatcctttgaaatatacatcttgctaaaagttcctttcccaaggaaataatgattaaagataatgtgatgtgtacaaggaattctgggacttgtagtcgagaaacctgaactttaatctagactactcaaatttataactttaggcaaatctctcttgactttctaggctttagttttctagggttttgttttgatttgtttttttatgtttttgtttttgtcttttttttggggggagggtgttgagacagagtcttgctctgtagcccaggctggagtgcagtagtgtgatcttggctcaccgcaacctctgtctctcaggttcaagcgattcttctgcctcagcctcctgagtagctgggattacaggcacctgccaccatgcccagctgatttttgtatttttagtagagacagggtttcaccaggttggccaggctggtcttgaactcctgacctcaggtgatccacctgcctctgcctctgaaagtgctgggattacaggtgtgagccacctcgcccagccttgatttggtttttaatctgtaaaatggtaggtgttgggtcacatgaacaatggctcttttacctccactaattacctagacgctagaaataagaatatggataagacctaaaccaaattttctagctaaattttgtaaagtctgaacaaaatctgtgtgcgttttaatctttcttgtaatcttttcagactctgcctttaaaattatatatatttttagcttctaagtaaacattattggcactggttttgataggaactttactccaagtgtattgacttagtagatatgttaaaaaggttattgcttagtttgtggaaataatacaagctgagactttaactgatatttgtattttcatttaggttccactgttttctcttttgaatgaaaagtataatcctattaaatctaaaatattttcttacagtgatccgtatgtgaaactttcattgtacgtagcggatgagaatagagaacttgctttggtccagacaaaaacaattaaaaaggtaggtgtcgatctttaaccaaatgtcatttaagtcataatttaatccaattatgcacagtcatgtgctgcttaacacctttttggtcaaggatggactacttacacagtgatagtcccgtgagattataatggagctgccatatacaagtgcatcactttttctcttttttttttttttttttttttttgagatggagtctcactctgtcgcccaggctggagtgcaatggcatgttctcagctcactgcaccctccgcctcctgggttcaagtgattctcctgcctcagcctcctgaatagcagggattacaggcacctgtcaccatgcctggctatttttttttttttttttttttttgtatttttagtagagacagggtttcaccatgttggccagactggccttgaactcctgacctcaggtgatccacctgtcgtggactcccaaagtgctgggattacaggtgtgagccaccgtgcccagcccactttttgtcttatatactgtattttcattttaagtgtctttcagtattaaatctagaagttttccaagacttttcagtactaacccaagatagtgattcaggtttttacttaaatgcctacaaaaacagtatcctgaaaatgtcataagttgtaacattttttcttgcacagaatacagcaaaaacaaggatttgtttttgtctttgtatgtttcacaaagaaacttaaagtaatttaaaatacatttaatgaaatggagctgtttgtggaattggtaggcacaccaggaatagtttaacttgaaacaactatttctaaaggaagcaaaatacttggttagctacatggaaatagagaaaatatattaataataaagctatacatgtatgtatatatcttattttcctaatttttatgtacatgatttcattaaaaatttgtttccataagtatgtcttttagttatttatttatttagtttgagatggagtgtcactctgtccacccaagctggagtgcagtggcataatctcagctcaccgcaacctttgcctcctgggttcaagtgattctcctgcctcagcttcctgagtagctgagattacaagtgtgcaccactatgcccagctaattattgtatttttagtagacgtgggattttgccatgttgaccaggctggtctggaactgctgacctcaggtgatccacccgccttagcctcccaaagtgctgggaatacagatgtgagccactgtgcctagccaataagtatgtcttaatttgcctatctccatgtatttatagacatatgtaatatatatatatgtaaatattttttaccctatgtttggaggctttattgaagatgcatgttctctattaaaaatacttggctgcatgtggtggctcatggctgtaattctagcactttggaggccgaggctggcagatcaattgagcccgggagattgaggttgcagtgagccataatgatgccactgcactccagcctgggtgacagaatgagaacctgtctcaaaaaaaacccaaaaaacaaaacaaacccctttcatctgtgctttagtatcatttatgggttactatgatttttttccttacctcctttagaggcgggtgcttagatagtctaacactttgctgaacattttctggacagcatgagtgctttaaaaaattgtaactgtcttgctgccatgcaggcacccaggatgcagccaggtccttttgtgtaaggaaccataactgcagcgtgtcctccacttggcattgggactggcattaaaaatctgttttgcaaacaggagccagtcttttgattagcagggaggatgcctgcgagggacggaggccattgttccctgtgttaggcgttgttgctggttcagtttctaggcgagtgggggctgtctagaaggctcaccaggaaggcagctgggaaacttggttgcctgctggatgtggagccaggaccaaagccggcgactggggctattgcaatggatttccttccaaagggaggtcctccttctccctccctttccacggtcgagggagtagctctgtagctgggtttgccctccttctcctgctgcccgcctcctggttcgtatgcctctgctgcgttcgggtgcgagaactgccgtcatcctcctctccttgccgtgttgtgactggttcttcgttcgttttgtgctctcctgtcttgttgctttcctcgcctgtcatttcccatgtgcatttccgtgaagctgccctccgggactgcagccagaggcaggccaggcctgctgctccactcccctcccctcgttcattaccatccttggcttcattcacatgggagaaaagtatgaaccccattatttaggattgaattcactgtggagttgtgggtggggaaagtgctgaatttttgaaaacgccggttcagtgttgtgtgagctctgtgtttcctatttttatgttgcactctgttgatttttttcatctccctgaactgatctattaaaggaaatagattgataaatatcattttgactaaaaatatctatcgctgttggtgaagtgatggtttttttttacatacaatttttaagagctgtctttaagaggcttatgcatgtgcagatgcatgaacacacatgtacagtcttccttcctagaacatgcttcctcttagttttgggggatatctggcagtcctttcttccatgctgaggacaaaggtatccttgccatctccttgtgagatgtacatttaagtagactgatagaaagatgaacagatggatgaatggagaggaagactgaaggataagtagacaagtattttttaacctggttatttttggagaaaaaaataattcacttttggcttacatttggtctttttttttcttgttataaaatctgatcctcagtatagctctctataaaatgttaagatttcaatatttatataaacaatgaacacattcaactttcccccacctgcttcgttactctgcaaaacagatttgtagcagggagagggaagtcaacaaagttcatttccttcttggtagaataatcatatcaatgctaatttcttgaagaaattttttatattttcacgatgactctttccaggcctttgatgtttttccttctggtgatagaagcagtttaaggtttcatacctatgaagcatctgtttcataaatacattccctccccctccagtttggtttgtacgctagtctcaaataatcgactaaatgcttctcttagctttttttaatcaaaaaaatgtttaagcaaatatgtagactgtattgtactagtaactgctaatgtttgaaagactaaaagatactacaagataatttctcttccagacactgaacccaaaatggaatgaagaattttatttcagggtaagtttttcattgtttggtaataattgttattgatacgtctaggtcgattatcacagtcaattcatcttgaggaaaagctcttaaatttttaatgagaaattccttttaggatgaaaaataggtagcctcctaatgtgtcccaaattttgaaagactagaagtagtggtcacagaatccggacttgtttcattggggagtgttttggagaagtcaaaagaaaattatccaaacaccatgtttcatcttttgaattcaaacctttctttaagaaataagataaaatatcatttatgagaatggtttaattctatgagacgggttatgaaatattttagagagagtaaaacagtagaggcaacatgattaaaaagaaacataaaaattaccagttatattctagttagggaggaaaattttggtaactgaaacacttgagtgcatatatatgtgtataatataaaattacttctggaatctaaatacaacagaattaggtaagatttcctcaaccttttatatttaatatttagaatagctatatgtcgaaatgactgaaatatgtgaattagcagagatttctgcttattgagcatttgtggttgttgctgtgttttactactgacattttggaactattagactgcttagctatttaattgaaagaaaggactttctcttcaaaacgaaggtatcttaattgtatagctgtgatattaaaaactgcttacctccagaaataatccaggtcttctgattagtgcagatttccaaaggccagtattgccatgaggcccattataattggtcctgatttcttcctctcaatcgcaatagtattttttgtgctccaaacttgggctactacatacagcatctgctttccattatgctcagagctgaaatatggcactgatactttcatacttggtgaaatcctatgtacagcctccaccagatgtatttgaaattaccctgtggaggactgaaaagctaataggagctgatagatgctgttggcctttagttaactctgaaatatagctttccacttgtgaacctccaaagtgtttagactcctttcagtggaacactggcacagttacataaatgttagtacatcccatacttttttcagctaatcttggcagtaggcacatttaagttctatttttgttagtttttctgaaggttttttttgtttgtttgttttgttttgttttgttttttgagatggagtctcactctgtcaccaggctggagtgcagtggcacaatcttagctcactgcaacctctgcctcccaggttcaagtgattctcctgcctcaacctcctgagtagctgggactataggcccgtaccaccacgcctggctaatttttgtatttttagtagagatgaggtttcaccatgttggccaggctggtctcactctcctgacctcgtgatctgcccgccttggcctcccaaagttctgggattacaggttcttaaggtctttatatttattcattttacaaatctttattgagtgcctattatgtgccagctcctgcctgtagcctgtggttgcattggtaagcagtgtgacccttcatagagcttctaaacagatagcaaaccccatctgcttgttctgtcgctaggctgcaggcagaccacggaccagaagcacaagctgagctctctgtgcttgtatggtcaagtgttatttcatgcattccccaccatgaagcagccagggcctaggtcacctctctgctttaccatttagagcctttgtgaccctggaaaggccacctgaggactctcaatctccctgggatccttatctctcacataggagagagaatccttacctgcaagggttgtttcaaggatttgcatgcgatgatgtaaatgagaacatgtagctctatgtcacacatgtggttggtgcttagtaaatgatacctgagtttggaagatgatatgggccattttggtgaggttttggtaaggaaaaggaagcaaaaagatatggaaagcccagtagctctgtcattgcctcacagttccaggtctctctcatggttcacagtctaggctctggagacaggcagcatagacctagtgcaggtcctggttgccctacacattagctgtgggctcttgggcaagttacttcactgaacctcagggtctcggctcctcatttataaaattgcgtgatagttatacatcataggattgctgtgaagattaaaggagatcatgggttgttgatatttaataacaagacagtgcctaaaaagtaagtgcacaggctgggcacagtggctcatgcctgtaatcccagcactttgagaggccaaggcatgcagatagcttgagcccaggagttcaaaaccagcctggggaacatggtgaaacctcatctctacaaaaaaatacaaaaattagccaggcatggtagtccaagctactcaggagagtgaggcaggaggatcaattgagcctgggaggttgaggctgcagtgagccatgatcatgccactgcagtccagcctgggcaacagaacaagaccgtctgtctctgtctgtctgtctgtgtgtttgtgtgtatgtgtgtgtgtgtgtctctctctacacacacacacacacagatacattcttaagctattacaatcttcttcattatttttatcattactattactgctatcaggactaagaaatatcctcaggcatagacattttttgatctacagtcatgagaatgccttgtacagaggttaggaacccgtcaaagctatttacaactatcctttcttattttagaaaaacagctaagagccttctcttcttttgctatgcctaaatttggggcagaataatatagaaatcagtaataggaaatttgatttagtacacatagaattcccagaacagcaggataattgttcatattatacaattgagttgggcgcattgtaaagcagtatgttattctttctgttccttacgtcgctgttcaaatgattcctgctcgtttaaaaaatactatttatgttccttataggtaaacccatctaatcacagactcctatttgaagtatttgacgaaaatagactggtaagtggatgcctgtatttgaattttgcttcatttttttattaactggattttcagagcagcgtctttaaaactctgtgtttatgttgtacttaggacagtatatgtgcccaaaaagaagactgtttttgtcccactacgagtttgatgttcaaaatcctaacaaatagttttatgttgctaggataaaaaatgtatttgtatgtgtgtgtatttttattgcagttaatgttaacgaaagccactggtgatagtaccagcccatatgctcatgctctaatgttgggaatacagaacggtaggcagatctctaaagaggccatcaggaatgtaaacaaactttgctcggtttttaaatgaaagccagaccatagtactgggatgcattcagtagcaaatctatggtaattctctcagggaaaataacaatctaattaacaacgtatagcaaaaagtgaatctacatttagcaggtaaagtcaagccgtattttaaaagtggttgccttcttaagagagaaccttagaaagtacctttaaagaaacaaagatatgcctgaggcatataacagatacaaactaacattttatatatagattgatgtatatataatatgtttatgaagatcgacacatacataactgaaataattatgatttcattttattgtttttaattttttttagagagagggtctccctctgtcacccaggttggagtgcagtggtgcagtcgtagctcactgtaacctcaaacccttgggctcaagcaggactccaggatagctaggactacaggcatgagccaccatgcctggccagatttcattttagaaatggaatttttgaagcacattttgctttcttaactatctaaaacgtgtacatcaagtagctgtgaaccaggtgttccaactatgaaaatgaacactatcatgttaagtccttaaggtaccttcagaagtgacactataattcagtgcagtcattctcaaatttaccctctctgaaacttgtatggtatgttgactggttaaaaggtgttcttaagaatcctttctgcagtattcaattgaaactccagatttttaatagctggacgttaatagaatatttgaattggaggagccttatacaataactcatttaactcctgttgttgtcgatgagaagaaccaggtctagagcctttacataaacacatcagtcagtggaggtgccagggtctgacctgctggcctcctaagtcccagcccagtgatagtttgggaatgtattgaatctcatatgattagtattattctccaaaagagaaaactaacagattttggcctaccatcctagtatcttttccattaaagtatgggatgttgggtgatgaacagtcgtacagtgtaactaaaccacttttgttgtatgcatcaaagtactttcttgtgaaattggatgagagattctgctgagggtgcagttcttgtctctccatctctcatccagtgaggaccaagtgagttaagcagtattgagtagtataacagtacgttcctggagacatgggtgtgtctgtagactaatccttattctccaattattgagtataatatctcttgtttaacatgaggaaagggtcaaatttgaggaaaaatggcctcttgtttgatgtgttttagttcattattctcttctattaagagaaattcactgttaaaaaattgtttcccatttccgtatctgaaataatgactgtagttgaggtgatcttgccctgggtctgaaatcatacttccaaaccaaaaaggactttgaatacaaaacttttaagaaatcttgtatgaatacaagctatatctgaaaaattgtgttttataatattgatgcctagttttgccccaggccatctgcagtgtggttactatgcaaagaatgctggtgttgctgtttttttttttttctttgttggctattaacccagcggagacaatatgtggctatggtagtacttggaagttctagcattacacagactagcttccatttctctcatagaggtcatttttggcatttaaaacacatacttttagaaaacagatttggatgtatgtaaacacagggttaatccaccacactctggatgctagagctgttgacaaagtcatgctttgcagattttaaaataaactttttgttactcttacagcttggtattttcccctcctattttttttacctcctctaaataaacctctttgttaaataattgatgtttctggatcatagaaaatagtaagtttaaaatacagaatatttccaagctaactacaaatctgatgacagttttttgagtgtgcacttttccttttatttcttaggtcctttttggtcctttgcaaacatagtaagattccatatttgtgtcccaactgtggtaatattgctgacttcttactggaaaacagtcagctctaggtagcatttcttctgtgtggtatttaagttaaattattaccaaaaaaaaaaaaaaaagcccacatgcactcccttcttcaattttccttttgttttttgttgtttgtttgttttttggttgatgttttctttcctacctgacatatggaagacaatgttttctccagctgggttcattttctctttgaaaaggagacactttggtgtctgccagtcatatgtgagctacacacacgtatacaccttttaaatgaaaaatgctgtgatagcaggagggctctgcttggctaactggttgtgtagcaagtcgggccccctcccctccacttagctattttgttacttgtagatcctgctctaattatttagcattaaacggacactaactctgtagggtgtgtaatcgtatttatagtactgttttattagtttgcattccatcctggtagtgtagtgatgtcataaataacagaaacatggtatccgatgcttgggaaggggtttacccggtggccaagccatattttacttgtcattattccgtgtggcggaaggtgggaaaataccgtgtgtgctgttaaacatgccaggtccctgcactggttagacagagtctcagtgctgtgctccgttgggaaagaagtgccctgcgaatgtgatgtggtttagatttatagcagcgtggcttgcagtgtgtttgctgccttagtcagctgtgagagcgccctgctggggccactcctttctgatggaaaagcagcagctgggaaggtgctgtttcaggctcttgctgtttaaaaaaaaaaaaaaagagcgagtaggggaaaactcctctaagtccagaagctggcattggagggggagagcgcggtcatgtggttctggccaccctaccctctgtcacagtgtggatgagagctttttgctcttatccaatcatgcctggaatgccgcttgccacttgggttatttctgctatctgtcgctcccggtgccgcagtgctaacagtttggcagatgggacactttttcttggaatttgtgtctttggtttgtgacttctggcagtgtcgggcctgttgttgccgcttgccctagccctcctggcccccctggtcaccatggcccatcggcttcggtttcattttggctctggtcgcagcaacacagcccccgaatcagacatcctagaccaggagagagaagacgacttcttcatggcattccacaccctaccgcggagaagcagcccgcaccccttcgcccagaacggaggggaggacggcggcggaggcctgcagggaggcgtgggtgcgcttaagcggagctcgtccatgttcatcccgcagctcttgaccagcatcgacgcccgccccacgtgcagctcctccgtgcagatctccctgcagcgcaaggccacggacggggccacggacgggtgcgggccgcccgagggcgccgacgatgggcctccatgcgcaacgcccgaccccagggaccaggcctccgccactgccaccacgagggcctcgccccagagtggctcccgggagccctcgccgagggacacccccgggagctcccctccgagggcagcccgggacccagggctccaggtcaacggcacgtgcggccgccgcgtgcggtgctccggccccgtggactgcgcggaggaggctgccccgggcctgcgcatccagcaccgcgcctccagcgccgacgtgcgccaggtgaggctgctgcccctgggccccgatggccagggcggcccggccgcggcagagcccaggcgctggtccctgcagcacgttccagatgcttctggaagctctgggaagcggtgttttgtcttccagttgcagcagccccaacaaggcgcttcggggccaggcagcgacctcaactttggcttcacgggcacaaagggggacaggttggtgaggtatcctcgcattcggctggagaggagcacctcgtaccccacgcagccccgaagcgagcgagggagccccacggaagatcggggagccctggaggcatcgcctcgagctggcaggatggctcctgaaatccgcaggacgaactccgcggagaggactccgcagggccaggggtgcacatttaagatcaggcaggatcagaacgcggggcagcagcattttagaattcttgtaacccgggggccggaagaagctccccagaatcccgaggagaaaagcgccaaaagccctgtttccacgggagctgacaccacggtaagttcacagcgtgtttacatgtgtttactgatttcaacttcgatgcttactctgcggcgtaaccaaaataaaacctcaccctctgttccgggagtttccctgcttcaggccagtggatctgaatgtttggccgagttctggcacgatgatttgtggtccagtgtttggtgcgcaaaacaccatttctgcaaatgtcttctgtaggtcctcaaagtcaaagaactttgtctgtttgggaaatccaagcagaataccttccccctgcttttatttttctgaatagaagaatttcgaataaaatttgttactttaatctgccaaaaaacaagtcagtgccccaacgtgctgatgttggaattgcatttaaaaagctgcttgcaagtatagcctgtgacaatactttaaaaataatcagttctcggaaaggggaggatattgcaaaggacctcagtttcgtctcttaatagttaaaataggtgaacgtaaagtttagtggaatttgattatctgtcatggcctgtttgctgcaggaggtcaggtcagtcgttgttatataatttgctttgttttttgtcccattaagtaatactgaacgagagtagtgtcgcttgtgggatagtgacattactatcccacaagtgacactgctaagatactaacagatgcgtttttaaagcacattgggttatggcccaaggctaggggaaactgatggggactcgttaatggtcagatggcgtggcgtgcaatttaacactgcacacttgagtgtccaagccgaggatgctgtatatagaatagtaagtaccctgtctccagctgtggagaaatagacgccttagaacagattctggccttcctgtttctctgttcctgatcgctccctttcagtgaaatggagtacagagagacagctgcacgctccatcgaccaggcatatgatgactctgcagctttcgtggtttagagtggaatgaaaagtttaatcagtttggtttcttttactagtaatcactagccagtgagtgctttctcctaaagaacaagctccttatattttgaattggatattttttctcctgaatttcatgtgactgccagtttgaggatatgattagtaaatgtctaggggacttttctttggatttcacttatgaattgtgattttgaaaagtgagcgtctgagtattactctagaattgtattgtcttttattgctttgtgttcagaaataagtttcgtctttcaagtaaactttatcactcctccatcattggttttcatcattttgaagatacaatcagatgcttaatgaaaatttatttttcttcttctctttccttccatgtatctcctttctttcattatctcaaactcttctattgggaaatggctaagtgctttgtcttggtctgaacctataccatgtattacacaatggtacaaattttgacagtgttttgatattatagtagcctttaacgcccacccccaacaaattaccatcatgacagttgtaggctttgttcggcaacacaattccatgctgaacttggaccacttaccgcatgaagattgacaaaaatatatttcctaaagtttgataactattcaattatattaccaaaaactgaaatcactttgcagttctgatgtggaagacaaagggattcatacaattaaactcaaaaaagttcaaactcatttggtttgaactttcaaatgtaattagaaaacaaatcgaataaactaaaacttatgtgtaccttgcttaaaagggctattctaacttgcaaggcctatgtagtgaaaaacaagtttctacacatttggagaatataaattctggaataaagagcttttcttggagagtaagttccaactagtgaacagtagtttgcattttcatatgtatgtatttttgtacacatacataaattagtacgtggttagtaagctggttttcttttaagcaaaacgatttttctttaaaaaacaaaaccaaaagtggtcacataacaaaaccgcctgctccattcagcaactttgtatgcatttcatatggacaggggtgttaagtttaggcagcagctgccaccgccttacttatcttgaaggaaaacattcacttgggcgtctacagtctggctgctaccaagcttttttggcgtttcaaatatccactgctttggtctaaaggacattacattattaagtttacatgaaaaattagctagaatctgttgcagtttggtggtggaatgatacggaaagtcttcctagatttgggaataccgctcgggattcatttgacaacgtgctcatatttcataagctatactttagaccttattacaagattaagttgttgagtacttttatctgtgcctcccaaacatcctgccatgactaaatctaaaatgtaacatgactccaaaaaatgttaaccaactaaattattagaaaaaatacaggggaaacccttgtgatgataagttttccacctggtttatcactgtcagtagacaagaattcattcgtatagtcatcaattataatcagttaaaaattttcagaattgttagaatttaccaattcagtctgtggcagtcattagtagtcatttagtgagtaatttagttattttcttataaattagcttttgggttattgggttctgagcctcttaactgcattagagttattctgaggaagttggaccaccatttaccagcatttgtgccccctttgtatgccattttgtgcataataactgtgaaactctgcattttacaagcttgaggagccagttttctaatctcattggtgttatgaagtactcaaggtctactgtgtatataacattacacccgttacttggaaagtttcagggactatctcagtgtcttgctgacacagtttgtaatgtaaacggagggaggagggcccacccggacaaaagcagtaattctaacacctactgcatatgctattggagaagagagcgttctttcagctcaagctctctggactttcctctgtgtcctctcagtggacatgtacttcacaggagtagtgtagtaatctcttgtgattaaaaattacttttattgaacaacaaaggaatatccaaattcttttcatttggggaaactttgagtctcttttacagaagatgtttttaatatacggccattttttgacattaatattagtcgatgtctgttttttaccctaaaaataactcgagtatccaatgtattaaccacccctttattttaaaacataacaacacaggaggcgaaggtgggaggattgcttgagcccagtagtttgagattactgtttctaccactgctctacagcctgggcagcagaacgagactttgtctcaaaaaaataaaaataaaacttaatattgtaatggagaagaaaaacaagtagcattcttttcattgacctggtttctgactggattcaatcaactttctttcttctctcatgtatagtaatgctctctcttaatgtggtcttagaataaaccaatatatatcttcaaatgtcacctgttttcagggatgttttgaaaagttggataggcagtgcacaaggttgacaccgatatgtttgtaaacagaaactgtacatggcttgcagcatagctcatgtttctgtagcacttcacaatttgaagaatgctttgtttatttcacttaatatgtatggctgtcccattgtggaggcattatctcacttgaccctcccatgtgaaatggtgttatttcactgtttcagatgaaaggatgtgataccgttgttaggtgtaataacattatgtgtatatcatagtgtatactatgataccactttgtgcacctataatgggaatgtgtatttatgtgtgtgtgtatatttgcacaattaaaaagtatatgttaagccaaaaagcagtttaatgcttcctgtgatgtgacagtttttttgaaaagtttagaggtggtaacttcatttggtgtcttgcagcactggcctgaaggtgagagaaggcttctttggggatccaaagagccgtcctctgcagttcactagcttttggtcctggagtacttagactccctctctaagcctattcctcatcagtaaatttgaggataaaaatgtccagctcgtaggttcatagttaggtttaaatgaaagtgtccatggaagtacctgattcgtgaaccaggtatctgtaatatacaagtctttcccctagcaggttaattaggttaattgtgaacaaccattttttgatcagtatggcatttaacacaaggacaacatgcatttatggcatacctggaaatgtttaataaatagctttgatgctctttctgttgtcatctcatctttcctaagtatttgtccctaacaccaaatacagtcttggaaaagaattgcttcctgaactatgcattatagaaaaggactcgtaagtatatttactgtgttgattttgaagccttataacattttggcttgcatttctagcatattttttaccatgtcattttgctgtaatatttccagtggttgagtctactgttactttggtatagactgaggcttttgagaaacaatatagtgttatatctacaaaatttccacattgtatgactttaaaatgagggagatatttgggaatatgtcttattttaagatactgtcttttagagagttttcataaatggtgcagctgcttctcttggctaagcctggtggcagaattcctagtcattgaaataaatctctaattttataatacatactgataagaaacttgctatcttttcataaaagttcacagtaccagaataaatttactttatgtaaaaactaccttaaaatgtaataaatgttggatagttgaatggtttctggatagttgatgaatatttctgtatagttgaggcgaatctaaatggtaatgctacttgtgcaactgtcaatgatctagcacattttttaataaaaataattacctgcatattactgtgggcgatacaggttagctatcctaaatacgtttttacctttttaactcttaattatattaagccatttgcaagaatgggaaaaagcaggaaattcataggtggtgttgaaattgctgattctacacaaaggtaccagaatgtctacatttcctctgtaaatgtcaaaggaaactttggaaacccacctcagagttggctggtgattattcggacaggttatcatcctgtctgcaaccttctagttctcttagttcataccaagcagcatgatattccatgtcctgcacaaaggagagcaccaaaacagccttcacctgctgcgtatgccccactctgaataaaaaattaagaaggccaaaggacggaatgtgttaaatattagcaaaagcaggtattgcagaatgtctatacatttctgggcaggtggagattattgaaagatttttagaaataatcttcgttcaccacattccagtgccaggccctggacttctgtctctatttgtgataaaatgtttttaagaaatgctggctgggcacggaggctcatgtctgtaatcccagcacttccagaggctgaggcaggtagatcccttgagcccaggacttcgagaccagcctgagcaacatggcgaagcctcatctctacaaaaaatacaaaagctagccaggcgtggtggcctctgtctgtagtcccagcttcttgagaggctgaggtgggaggatctcttgaacccgggaggcggaggttgcagtgagctgagatcgtgccactgcactccagcctgggcgacagagtgaaactctgtctcaggaaaaaaaaaaaaaaaaggaaaagaaataatcttctctcagtgagcatgttgaatgcataatgttctcactggagttctcctttggaatctcttgattattctgctgtggcttccttgggccaactaggatacagaggagaataaatgagtaactcagtgagacaggtggcctgatgtgagtgggcctgaaagttagcccctgatgtcctggctggtttcatgccatgtcctaaacgggcactttcctggtctctaggcatcaccatgttttgacaggaagcttagtttctttcaggatggaggatggaatcaattgtatttcaagaagcctgttttttatgccctgacaattttagaactgtggactgttctgacacttttgagtacagtgattaaatctctgtgaagggacaggtcatgaaatcaaataaaaggacggatcataattgagctggaagggggccctcctatctctgatttgactcgttgctacactttagtattcggaaactttgtattggttcccttaagtgcctgcacaacctccctatttctggaaaccattcagtgtttgttttaatgttaagcattatgccacgtatccagtaagcagagcagagtaaattcctccaggtagcaagagactggaatttcccccaggcagatcagcttttcacaggttcctagagtttacacagccttcttttgtgacttaatttttgtagatcacagtgagtcaagtgacttttacttccctgtataataactttgaggagcctacttgcaacccacatcatcactcattatcttgcttacttctttcttgggggttagatgggctggggttgttattaagcatgttaaatactttgaaattcaaatcgtttctgatagatttagtttctctttcttctattggtcattcgagagctggtagacttttaaaatacatttaatgactcacacatgtcataactcatccatttccttgacattttcaagcgtgataataaatcctacttcttaggcttttttttttttttttttctctctctcatgttcttttcaaatgcatggctaggtagttacctcatgaaggaaaacaactgttttggtccagattttaaaaattgagttgaatagaaaaggtggggtggaaccagcaatactgaaatgtaataatgtatattaagctccaaccaaacaatccagcacttcttcaaatccaggaggtcttctggctaggagttacattgcagaactaacatggactcttaaactttgtaaggaattagtcacagttgaacactggaaactatcagcatacctctgggcttcttttatatggtcttcctcatgagttaaaatgccttaagcatagtatctgttccataggaccttactgattatgcttttccacttgaataaaagagatattaagttgtaataaaactttaaatattttaatttagtttgaatatttaagttgaattaacctcttactacagtaattatcttttttgctaacttcttactacggtaattatctgcttttataaaatccagaaacgatgttatacacattagcacgcattattaggtgcccaaatgccaaggctaaggacacagcaatgctaaggacacagtgtgcctccggcctgcttgcaccctcggttgaaattatattagcaagagaagctcctgcattctgcagtatggcatttttctccagctaatgtatgcaggggtcatttttaaatgttagattcacagatttgcagagctgtgagttgccttggaaattatgctggccagttcctttaattttaaagatgaggaaagtgagaactttcctttttaaaaattgatacataatagttgtacctgtttatgggggtacatgtgatatcttgtacctgtttatgggggtacatgtgatatcttgttaacatgcatacagtgtgtaatgatcaaatcattacatactgaaatatttgaaatatctgtcactgcagacatttgtggcatctgtgtgttaagaacatcccaaatcttgtcttctggctgttttgaaatgtatagtaacttcttattaactgtcgtgctgaggacatggactactgtgctgttgaacactagaacttactccttcatctgaccgtattttcgtacccatttaccaaccctgagagctttacttttgcagtaatagagaatattctttttctctcttgagtatgaaataattatttttgaataatcactgcacgtgaagccctatccttcttgacgttggacatataaatacttagggagcttggtttatagagctttcagtttcacaaacagatgggacagctgaggtgaggcctgcctagcagaagaagccttactcctgatagcaggcactaagcaaggcattgggtgacagattgcttatgcacaggctgggagggacaggaactgtgtcatggaggggcaagactggaactagatgctgaaaagtgaccagatttgtctcagtgggccagtgggaggggcctcattgaaagactgaaggtagatgtgcctcccagggatgtggtggtcatattggctccaaattgccttgttcattattagcaggtttcagcaaattatttttcatgtgaaacgttgctgaagatttcttgggtgtggctgtcatcacaaacaattcctctcttttccatcaaatgtggagttggatgaattccttccttgctggcctgccttccacaaagctgctctctgaacacctgccaggccatgctgaggacaaggaaataccaaggcacagtttctgccatttaatggtggtagcagagacccaggaatgcaatggattattgtcactttcattataacatcatagtgtaggatcataactggaacagagaggatgaagctttcttttggggaattgagggagggagacagggtcttgctctgttgcccaggctggagtacggtggcgttaagatggctcactgccacctccacctcccaggctcaagtgatcctcccacctcagactcccaagtagctggaccacaggtacatgtcaacacacgcagctaattttttagtttttgtagagatgggggtcttactatgttgcccaggctggtctcaaacccctggcctcaagcagtcctcctgccttggcctcccaaagtgctgggtttacaggcatgagacactgtatccaactaagtaggctttatttatggagtttataaagaaactgtttatatatacaggggagaatttatcctgaagaaaaactaaagaaatgaatattttaaatacgtctctgcatttctttttgttggatatgacatttatgtaagaaaaatgctaatctgtatgatatgagacatgttaactacatatggtacatgtatttaaatatcatatgtatttagatttagcaacaaaaagggaaatataaaccatatttccaccatttgaacaaatcgtattcaattatatgtgcatataaccatttgaaaaaattataatgttgatcggatctgcaacctaaaccaagtgccaaattaaattcaggatagataatttcatataaaatgtttcacatcatagaaaaagcagtgaaaattgagtatcagatctgtgaaggatgatacatttctaaccttagaagcagaaaaggaaatcacagaagttggatagattcagccatataaaagtattaaatttctgaaccatgaaaaaaataactaaaatgagggaaacaccagatgtttttcttagtgattcatgtaagttctcatatgtatatcttttcagtgtctaattatgtgcatattttggccagtgggtttgtatctctgtagaaagttctagtaaatactggagaaatactgaggttcccccactccagctctttcactccattgcaaagtaggtcttgtaggtgaatcacacaaacggattaacaagaaagacagaaatgtccagctcccaggttcttcattatgctgttgtgttgtgccaatagaaaatacaatatatcaaattggagaacttgtggttgaaaataatatacgcagattgctggtggcagtattcatggatgtgactttggagtgatttttaaacacttaagtatttttaaatgataagaccaattataggtactaagagtcttgtgttttgaagtgttggagttaatccagataaagttacaaatctaagcagacaccttattaagagatcattattctctgcttttaaagtggacttgctttctatatagttatgaagaacagatagaaatgttttaagattactggctactattaaaataatctggtgactgcagttatatctgggtctaaggcattagactttttggaaaatggatgcttttaatctttccttccgtatatttgtcacccagaattttaaaatttggaaatttcattcattcagtccagatagagaattgatcaattggcaattttattatttttcgctcatgaaaaactctagggttacaagaatatgctcctgaagttaacatagttacttttaaaatgtctcaattctaatggttaggtattagtcctctgagttccggttgccccttaacttggatcttaatttacagtttacagaaaattgttcatatttcatattttaagatcatgtactctaaaaccctattatacttgaaatgaagacctgttatgttatactagaatctctcatgaaaatgtaacagttcccaaggaactttgtttctgtctccatggaccacactggctactgtactggatggagggcaaggcgggagctgagaggcctttgcagaagtgcatgtcgccttagtatgtggcagatcctggtccctggcctgtgctgtttccctccacaccctttgatttctccgaataccaggaaagatcatggattgtctcgggagttagtctcccccttagtacttagcctgtcattttcatgttgcaatgcctagaaaatgggaggtttttcttctccttaaggaagtgttatttcaagatgctttctgctgcctgtgtcatgccagggcgtgggtggatatatttttgcacttttgcaccagcgagtctgcttctgatttgcagattgcatttattataaggcgtattgtccattgatgaataatgtgtgggcattaaagcaaagctgatacatagcttttaaaatagctcatttatcctgcaagcttcacccccatagagaggcaggcccttcagaagcgttttccaggagcaaggtttctgcatgtttccctcagttttggaggtcgtcgttttttgcccctactgtgggggccaagggaaaattgctctgcgccttctgatggtcccctgaaaaatcaactgtcaaaagcccaattaataggagaaatgccatacaactttattaacgtgcatgcagattgattaccccaaccccccaatggggttcagaagcttctataccatcctgaggttataggaagaatggggctcagagcccgaccaaaaacagggtatggtggtcaatcaggttatggtggcaagaaagattcttggagggagagaagaggaggcctggctagcagaggtggccctgtcgtgtagatgaaacctcctaggtagcagccctcacagagaaggcagatgtttctttcagacctttaaagatgtcagactctcagtcaatcttccctagatctggacaagggagggccttagagaaagatggcctcccatcagtgcagtttcctccccaggtgcaaatctccccccacagacctgccctctgaacagccattcacagtgtatcaaagaggtatattttggggtgaaatatttttattcccttcacccctagtttatcatgtgtttccttgatgggctgagggcttgacagatgagcagatagacacaatcttagttcatggaaaaggcaagaatagagatgggtagcggagagtttttaagttgctgctgatgaaatagacactcctttgtctcagctactgaaaattttctttagaacgtggatttaaataaagaaagaaatagacatcatgctttgtaatgaagtcctttggtcatcgtaagtggtcacagccagtttatcctcaggcttctttaagctgaccagttaaggtttctgcagaggttctgtgtttgagggaggagaggaagtccttggggaggaggggagcgttctatgggagacagtgctcttgggagcattctttcaatctgatacccatgcaagggtgatgacaaggtatggccttcagtgactcagagcctcctcccttcccaagcctcaggcctgaaagtctggtgatcctccctggcagaaacctcactggggatcattttttccttttgaacaagtttcttactttgcctcatatgttccaatcttctgtcagtggccaggtgacatctgttggaatgctgatgtgtgttgccaagcaaaacagatgcaggaagacttgcccaaagtgggggaagagagggaggaaagggaggaaaagtgggaggtagagtgtgttagctggggagatgggatcgagcagtatttatctatagaacagatatcaaagattgggtaaatcatggcttaaaactctcagaaaagcattctaggttcttgcacatctttgcaaggctactgaatggctcatttttatttcccaccctgcattcagagtggtgtttaaatggctcaccgcagcaaaaaggattaggtattacccttgtgctcaacacaagtctgtggtcagcagatttttaactttatcctagtttattgatatttctgtcagtgaacaggtttaactcttaatggaatagaatctaccaagaataatgcagactggataaaaagaatttcactgattttgattatttagcacattaaaggggacccctggccagaagtagatgtattgcttgggagaggagggcatagtacccaggtggtacttcagggattctgattttcagtcagggttgagaaaaactgatttaagaagttaatgctactgacagcctaaatctgggtttccttgataacctttggtgtaaatactgatttaatgcatttttttttctcacccacttttccttcatcaccccaaatctatattgtgttcacatggttcctctttctagaggtgggagatgtccttttatggctcagaggtccacaaaataaacttgcattcaagcaaggttgtaaaatacctatgcattaagagcagtccagttgaatatttgcaaagcatatataaaagagcttctctcctaaaataactgaaatgaaaggattaattttctctcagtttcctactgcaagaagtaagtaaaagtggaattccaattctagccatggcaagaccggtctatcctgttatgtcttgtgtgccaataccacttttctccaggtaactaaagtatctccctgctgtaaatattaactgagtgcatttttgtggcttttgataactccacgtcttgaaagtgttggccagttgtcaaattttcatgaatttcagagaagtgggtaataggtggtttctctcacggtatttaaagcgaagtagtaaagaggaaaaagactgaaaaggtaacctgggtcaactcattttttagggcgcacagaagtgtggtagcggagcctggacatcaggtggcctgaagcccaaaccaccagctcccccagcacaggagagtgcaaactgtagctcagtcttggccatctggggtcttctgcaaatgaactgcccatagtctggccaataattcacactgttgtattgctgtctttcattctctcttaagtagagcgttctgaacatatctgaacaattttttgacacgctgttactctcctagccacaggttattttatgacctagtcattctttacataaataaacatttatcaacagtgctgtctgggcctagtaaggtatatagcctgctttgtttctgcattaaagttcttagaccgccatgatcttgagatgtttgctgcttattgtttctttctgatttctattgcttatcagttactactacttgtggctccaaggatagaggccgattccctcttctaatttgctgcctctcatctgcttgaagtttaggtgtttagtcaagctcactagcattgtttataaaggaagaataaataggttgagagtgaggacttagggtagttacctttttaataatgtatatgatctgtctttggtctttctccctcatatctctgctgattttactctcgtcctcctggaacgtctctggaatcagatagatttttgtaagatttggatgtaagaattcagtggaataatatatactagctgtttagcctagtgctcggcacatattaatgcttaataaatattagctcttattattattgtttttttccctgaaagagaaaatcttaattcctcacagatgtttaggaattggatatgtagcaaccctatccactgaattagtatcagcaaacacatttttagttcatcttgatttttatcttcattgggattatgcctttatccctttagggttaatgaatttcctactgtgctgttatggaagaaccctgaaaaaaaaatcaataaaatgtatccttaaaaaagattttatgattcacttgactaccaggtgtcagcaacttttatttttattactttaagttagaaggactttgaaggttttcgtggtttattctcttcttttttaaaggccaaaccaagatcactttttggtaatggctacctttcctctgaatgtatttctcaaaaagttctttctggtttttattaaacccaaacagttgttataatttaaaagttacccttttagagtgagattagctagaaaagaaattaaggattattttaagtaactcagcaagtaaccttttccaagaagcttagattataaattaacgaaaaccaaattataaaccaaggtgtatggttgattgtgggttaagaattttatcagcagttttgctgttgtatgtaccagtcgtatattttactactgagtagaagaaaagtctaaaaatcaagtgagtagtttttccttagctggttatcatgtttgtttgatcattatattaaagtgctccttttatttttcgttttgtatgttttcccaacttaataatgaatgtgcttctctctaatctaatctctgaatttcaggagtctattaataaagtatgtgtaaagaattagttgctaattttggatgtggctgaaatgagattgtcagcaaattacaacttcaagcctaggactgcagtgttatggattgcacctcatccttggttattgaagatatattcaaaatttatgaaaaatagaaaaaccttattacttctgaatttttccacgttagactttccttatacttttaagatagtgaaagtgttattatataagatcatggaaagtttgtctttccagacctattttatgttaggattttacaatattaaattcataagataatagtagagactagaaaacaaatccttactgataatgaatttcctaagtagtaaatacaaatgaatatttatttgtaaacctgggtgattaagtaatagctgttcagtgatattgatggaaggaaattaatattatttaatccaaaggccaggcgtagtgactcacacctgtaatcccagcgctttgagaggccgaggcagatagatcgtttaagctcaggaattcaagaccagtctgggcaacatggcaaaaccttgtctctccaaaaaaatgcacaaattggccggtatgtgcctgtagtcccagctattcgggaggtaggaggtaggaggatcacctgagcttggggaaactgaggctgctgtgagctgtgattacaccactatactccagcctgggtgacagagcgagaccctgtctcaaagaaaaaaaaaaaaaattaatcccgaccttcctccaaaaaagaataaattaagtccagaaagtttggtgattcacttgctgttgccgcctttataaacataaaagtcagtaaggctaagggacacttctgaattccttctgctgtccaggtactgtgccgagttctagagatgcaagtagtacataagacagatgtggcccctgcccttgtggagactgcagaccatggctctttttcatgaatggtagagacactcataagtcaaatacctacatattttcatgaatgtgccaaaggaggcaaacaggaagctgagacaggaaatcatggggaggcctacttgaagagaggtaaggaaacccccaactcaggagtggcctgtaagctgaggcctgggaaggacccctgtgggcatggccagtggaactgcagcggaagcagccgttcgcccaaaggtcctgcgctgggaagagagtcagagatgctggaggatcagaaagggatcatccaagtgagtggaggagacagtggtccaggatgagcttaggggaaaacaggggcccctggattgttcacgctgtagaacacagtcatgcatctgatatataaatagcatggagataccctcagtagatgcaaaactcaaatgagctcagctgctctgaagcctgggaaaagtcagcaatttgtaaaattatgacacatccacattttcacaggaaaaacaaagactagtatgtaacatctcctttggtatttacagaggatctctctctctctcgttgttactcttacaaatgataggaggccacttttgttttccaaattctgtgccagatatcttgcctttcctgagatatagacacggtagagtcaggagtgtgtgtgagggcttgcagacttctttttatgtctttagaatccttcttcacttttgaatcatttggtccaggagtttaaggccttttcatttggcttttgttgttcatttgttgaacataaataactgtgttcattatgcagacaccgtgtcattgttgacaatttggtgttgtagattaaggcaacgtgaccatgtaacaagttgggcaaatgcacttatccattcagtgagctctaacctacaaggtgttttgcttcagaccaaaatggtagactgcagaaccttcggcgcggattttaagtccatctttaaaaccataggtagagattgtatctgtgtgttcttctttaattaaaaatgggaaaatgatgcgacagagcaaagacggccatggatcctttttatccctctcccatccacacagagagtttatttcccctcccctggagtccaggctggccttggggttgccctgaagtgatgccgggccctttctacacgtagcctttcaaaggaccggcagcttccacttcctgccttttggaaaagcttgctttagggatccagctgccacctaaaggccctgaagtgagccacgtagagagaagttccagctttctagcccatctccaagtgtcaggcaggtgagtgaagccatcttggatgctccagcccatcaccatccaactatagtcacataagaggccactgatgggcccagtccgtctccacactcctgagagttagtaagtggctgtcgtgttgggctctgaagttgtagactagtttgttagtgacgtataaccaaaagagagagtgtacttaacatttagtcctgggaggttcgaactttgcctccgcctgtacgtgagctccctggagtgtgggatgaaggagtgcttggcccagttgttttcccggaagctggaggagggcagccatgcacaggttgtgtagaccaaacagttcagggatgcacttggcttagacagctgataaacagctgcagtgcccccaagggagttgaaagagtgggtattttgttgtcaggagtagaattattcaccttgaagaacagaagatttgtagtttaaggaaattcaccatattcttaaaagttgcagaaagagaagagttcttagcctaggcctgcaccaagatccagttcttttgaatctgatttaataggcagatgatgaaggacttattcccaataataaagaatagttcaataggaggttggtagtcttaattgtcttccttgtcaaatcctagtgaatttcacatcagatactgtgccctgtgaggctctatcaccttagcacttggtaatacgttttttatgtagtaggtgctcaataaatgggttgagtttctataataatttgatttctgtagcatctgatttaactaagtttgctataaaacgaaatctgctattgtattcaacatcacaataagcagtatcagttgtaaatcatacctacatacagttaacccttgaacaaagtggaggttggggtgtcagcatcttaacacatagttgaaaatcttttgactcccccacaatttaactagtaatagcctactgttgacagaagccttactgataacttaaacagttgattagcatatatattttatgttataaaaattaaatactgtgttctcataattaaactagagaaaacgttaaaaatcataagagaaaatatatttgctatttattaagtggaaatggatcattgtaaagtctacatcctcactgtcctcacattgagtaagctgaggaggaagaggaggggttggtcttgctgtcacaggtgacagaggtagaaaatccttgtataataagtgagctcatgcagctcaaacccatcttgttcaagggtcaactgtacttgaatggatttttttccctgtcataattaaccacccacacacatcttactagaccaaaaaagaaaacttgtcaagcaaataatctcccatttcttgggtcatttggagagataacacaggccaggttatatgtcctgaaagatgagaatgtgtgaagtccccagagagtctgatacgaggccttcttccagggagtagtggtctggccgctgcaccagcctgccccctgccatgccctgactcacctgcacatcatgggtgctgctgatgcccaggcttcatggctgagcatggcacccttagcacccctcacctgttacccaacggagatttgtgggtcggaggcatttcaattggagaaggatggaatggctgagggcaggaaaacttaacaagcaggaagtctgcaccctggctgcacatgagaatcccctatgggcattgaaagtagggggagcattgaaggtagggggagcattgaaggtagggagcagtcaggtcccatttcctaagcggctctgcaggcctctaagcttgtcagtcatctttttggtgctgtgtggactagtgccagcaggaacaactggatagttttaagtctttggcctcttctgacactttttaaaccaaacattttattaaattctcattcaagttaatagcaaaaaaatattactactggtttcatgtttaggtctcatttgcagtttttaaaacaacctaacggagtatagtaaatacataaagtactcgatttaatgtgcattttctttttcgttttttttttttttttttgggtggggaggggggtggttttctgagacggagtctcactctgttgcccaggctggagctatctcagctcactgcaagctctgcctcccaggttcaagtgattctcctgcctcagcctcctgagtagctgggaatacaggcacatgccaccacacctagctaatttttgtatttttggtagagatgagttttcgccatgttggccaggctggtcttgaactcctgacctcgggtaatctgcccacctcggcctttcaaagtgctggaattacaggcgtgagccaccgtgcccagccctagtgttcattttctgacaagttctatgaaacctggtgacttaacttttctgaatctgtttccctatttgtaaaatgacaatacttgcagtagagtttatgtaaggaattaatgagggtaactttaagatctttgtaaatgctaatgtgttttacaattgtggtcagctataataataataataatattattattattattattaataaaatgcttactaggcgaagttaatagctcccacccattcccaaactacttaaggaggattttaagctggaaacagttaaggaaagccgcatgatgccatgagcaaagccttccatctgcacttggcatattgcagggtctgtagttgctggaatgcctatgtccctggttacgagccttgatataattgtgctaaggcattttggtggagtggaccgtgtcctgctgttgatcaaacatttctgtgtggagagactttgtttttcccttggggagtatttattttttagtgccaggctccgggttggctgtgctacgcttggcttttcagtgccaggcatacaaccatgtcagaagggggactgcatggtaggtctcaggaagaagggccgaggaagaggagaaaagggacttggctgtggacggggaatcctgtgtatcttggcttctctgagccagctgtgcctcagaactttgatttgatctttgtaccccatgggtcctgccaggtgaggggcacaatggagaagagaaaaaaaaaaatgctctgctgaaaacataagcaacaaataaaatagaggatagtaatcctaggataatccccgaggcagcagagaaaggcaggctctggcttgcatgtcaggagctctcttcctgggggcaggagggagggtggtatagtcccagatgagtgcttggcaggttgtttagagcctggtagcagtgaaaagaaatgtctaccaggcatcttgtgcatgtggtagatcttgacttgtaattgtggcagtctcccctaggctcctcggcagctaggtgacagttgcctgctagttcatgggtcaccttctcaccctctggcttgcttctcagtgggtgtaaatggggtaattaaaacctgtggttttagactttgctccaaagactgtttctggggttctgcagacattgacctgaaatttatttttattatttttaacgtttaccacctgtgaagatactgtacatttaaagatataaaatgtatcatattaaaataaaatagcctgtatgttttacattttgagattctgtttatgctgtttttttaaaaagttagaaatgtattggcatgttctgatagcttatttttaactacttctccattgttgtaatatcataacaggttggactggctaggctatggtcagaaattgcttatcagtgttttatacatacccaagggattccaacacagggtgtccatggtcctctttgagaaaactttgtctaaaagatattgaatgatgcctcattaaaaactcctcagaaatattttctcctggcttgttttcgccttccgtgtcattgtttgagaaatatccaagattccttcttttttacaattaaaaaaaaaaattgaagcaagtccataatcccatgtagttctttgatagaattaaacttcagataggcataagaaattcagataggctttctctccactggaaatgcatgcctttcgcaatcaacagtgtatgatgtggtctgttctggagttggggtctgacccttcagcatggccagcgctatctgaagatcagaaaccctggaagccccttgtctctttttcatcttccacatctgtctggcgtccaggccctgcccctcctgcctcttcactgccactgctgtggccagcctcttattcagaggagtttcctacctggttagacacttaaccacctccagacggaccccttctaatccacgtcccacattatagctcaaaagtatggattttacagatcttatcctctcctgttctgccaaaaccccatacggtcctccattaccaatcaggtgaatcgacttgcatttcccagcgtgtccccacacccacaaacactccatgacactgggcccgtccctgcctttattccctgtggcccctgtgtgcaggagccttccctcccctttctatcagtccctcatgtacaggccttcagccccctcactctgccctgttcctacctccatcattgtgccatttatgtttgcatgtctgtcttctctgtcatatctatctcaaactaggttgaaaattttttgaagatggagattttcagaataaaattgttcacacagttatatatttgactgattatacttttatttttatttatttattttttttgggatagagtctcactctgtcacccaggctggagtgcagtggtgcagtctcagctcactgccacctctgcctcccaggttcaagtgattctcctgcctcagcctcccaagtagccgggattataggcatgtgccaccacatccagctaatttttttttttttattatagtagagatggggttttgctgtgttggccaggctggtctcaaacgcctggcctcaagtgatccgcccaccttggcctcccaaagtgctgggattacaggcatgatccaccatgcctggccgattatacttttttaatgtgttagttaagatgagagagtccaaagtgatacagcccctgcccccacagagcttccagtctagtgagagaggcaggtaccaaaaagataatgcacatgacagaatggactgaactaagtagtagtagaagttcaaacgaagaagaagacacaaatggataaaagctatggattctcaggattgaggatgctgaaaggctgcacaggatgaaaggtgcgaccaagggtcctgaaaaaggcataggatttatacttgcaaaggagggcatttccagcaagaaggcttggaaatgagaaaatctcgggagaataggcccatgttagaaattcggtacacgattgagaggaaaagaagtgccactggggaagtgtgttgaagcaggtatgtggatgttcttccctatgcagtggtgtcagtaggattttttgttggtgtgagatctgggatctgtttgtaagccgtctgagagctgggactttgcattgatcaactttttgttgcacatgctctgtgatgtaattggcactgcatgatttgacaagaatgtgttttatgctctaaatcaggagtgagcaaactttctgtaaaaggccagatagtaaatattgtggcctctatttagtccattctgaatgtacattagacacaagtttctaaagtacattcacaaataagcattatacacttagttgtaacatacacggatgttgagcagagaaaaagctctctgatttttgtggttcctgctctaagccaggctaagtggtgttgtcagggttccaaccccttccatccctgaagcacactcagcaaaccatctagtttataagccacagtgtgctagtaggtgctgtgtgtatttttttgcggggggaggaggtatttattttgtttttgagatggggtctcactgtgtttcccgggctggtctcaaactcctgggctcaagtgatccttctgcctcggcctcctgagcagccactgcacgtggctgcatcgcttttaaaggtagatgatgcctctggcctttctcattgcctctgggtgtgtggcccatgtcactgtccagcgcattccactgtccagcccattccactgtctggccccatgccactgtccagcccatgccactatctgtgtgttccgtgccactgtccatctgtgtagggaagagagcaccaggggctggcctggtcaggagagctttctgggcaggggttgagggaggcacatgtgagctggactttgaataaaaagaaaggaaagccaaggagcagaccgggcgaggctgggtgcgaagaccagatgtggcagggatttaggaggcagagcgagcacaagtctgtgcatattggtaggttctgtagacttgtcggttgtgcagtggattcatggagcctgtcgaggaagctacctgtgtgcttccactaggaaagcacagccacagagagaagatgaggggcagggaagcagtattgtggggaattcggagtgagggctgaatctgagaaatattattttaaaattatgttaaatacattattttttgctgtctccaaccatcattactatgttcactgtagaaaaattaagaaagtcagtatggcatatagtcccataaccaagaaattcattcattgtgacctatttgagggtcatttaaaaatgactgatgtaatttggtaaaagattaatcaacaaaatgacttatttcataattaattactttccactaatgtgacatttctcaaactctgcagtatttccttttcttcttttcttttctttttttgtttcctgagacaaatctcactctgttgcccaggctggagtgcagtggcatgcaatcatggctcactgcagccttgaactcctgggctcaagcgatcctcccgcctcagcctcctgagtagcttggactacaggcatgcaccaccatacccagctaatcttttatttttttgtagagaaggtgtctcactatgttgcccaagcagatcttgaactcctgagctcaagcaatcatcctgccctggcctcccaaactgctgggattacaagtgtaagctgctgtaagctgctgtgcccagcctatattttcaagtctctctccttttttttttttttaaactggaaaggatagctgtgatggaaatggaagacttccaacagaataccttagttagcataactgtgtagtacaagatgtaaaaacctgttgaagtgggtggccttttgttatcattctgtctttctgcccaccctgtggcacagttctcaccatattttctgtcaactgctaccacatggtccccttctttatgttataaagtctcttaattattaggtaattattcattgtcctagctctccatgcttaccaaacaatattaacaagagcacggtattacaaatgagtcaataacaacttccctaaccttatggcagctgttttggaggaaaaagaaaaaagaaaaaaaaactgcctttttttttcttaatgcgttacaattggttgatcagaacagttttaaaactataaaatgttggctgggcgcggtggctcacacctgtgatcccagcactttgggaagccgagacgggcggatcacgaggtcaggagatcgagaccgtcctggctaacattgtggaagcccatctctactaaaaatacaaaaaattggccgggcgtggtggcagtcacctgtagtcccagctactcgggaggctgaggcaggagaatggcatgaacccgggaggcggagcttgcagtgagccgagatcgcgccactgcactccagcctgggcgacagagtgagactccgtctcacaaaaaaaaaaagcaaacaaaataactataaaatgtttaataaacatattttaaattaaaaggtaaggttgtatctagttatttatacagctatttttaaaagtcaggttggcaaaggtctctctgagtttcacaaaatatccgcgtgagtggtgcatagtttgtgctggcttatttccatttgttcgttgtgtttatggtaaccagtagcattttctaatttggttaaaatgctgtcattagctggtaaatgcagtcctgtcacctcagaggaggaccaagaaggagctctttctagaaagggagggatcgaattactcctcatcctcatatctacttatctatctgattttaagacaccactgaaatttatactgcgagcaatttaaatgaatgcagtaattgattgcaaaacatgtttgtaatatcagtgactgaaattaaataaaagataagtcagtactttttggatcaatccagttgatctaaaaataaaaagtagacatccactgaatggttgggtaaatgaacgaatgaattttggcttatgtcagtgaattggcctgactgggccttgatctacatagcttctcttgacattttgttgcccaaattgagtttgagtgtttttagtaggcagggtaaattagcggtatggatgggtataacattctacatttagttttgctactgtatatgagctcatgaaatggacttcccttccctaataatatagaaaaaagaaaaacctaaggaaatatagagaacacattcaatttgggaaattcccgtctgtatcagtcaaggataggctagatcatgttgatcatgctgcgtaacaaaccacatctcagtgaattaacccacaaagggggattttcttgctcacaatacacaatctgtgtcagcaggagagcagaattatctgtcgtcaccaagagtccccaggatgatgacggctaatcccattgtgccttcaccatcactgccataggtgaaaggaacgtgataaattgcacactgccttatttatttatttatttatttatttatttatttatttatttagagactgtgtctcgctctgtcgcccaggctggagcgcagtggtgcgatctcagctcactgcaacctccacttcccgggttcaagcgattctcctgccttagcctcctgagtagctgggattacaggtgcacgccaccacacctggctaatttctgtatttttagtagagacggggtttcaccatgttggtcaggctggtctcaaactcctgacctcaggtgatccacccgcctcggcctcccaaagtgctgggattacaggcgtgagccaccatgcccagcccatacactgcccttttaaagcctgtgttcgaaagtggcacacatcactgccgctcatattttactggccaaagcaagtcacgtggccatgccatttcagattgggaagtacatttttaccattgcccagaggaggagagagatatgcaatatttgagaatagccctaaagactacaatactatcccttagtccacctaaatgatcctgaggctttggggcaattaaaaaatccttactcttaaaaaatgtcaggcagtaagtcttgaagccagctgctggtgctacacaacatacccttgtcttgtgaggaatcccttttgaaaaggtaacttacctcgtcacttcattattgctcattgctacaggttgaattgtgtccccccaaaaagatatgaaatcctatcagtacctctttgaaaatagggtcttatttgaaaatagggtctttgcagaccctcttgcagatggagtcaagttaagatgaggccatgaatgtggaccctaatctgactggtagccttataaaaaagggaaaatttaggctcagaaacagacatgcacactgggagaatgccatggaaagatgaaggcagagatcaggtgatgcttctacaaggcagggaactccaaagattgctagcaagcctccagaaagcaggggagaccatggaatctccctcagccttcagaaggaaccaccctgcccatatcttgatcttggacttccagcctccagaacttttaaaccatcaatttccattgtttaagctactcaagtttgtggtactttgttacagcagttttagcaaactaatatgctaatcaatatatatttttatcatcttctttggacctagcaaggagaaccacttgggaaattgaaacaaggaccctctcgggaaagtttggtgaaatcctggccaacatgatgtctaatgctgattgcagtgaaattgagtactgttgttgatttttttttcctcaaagtagcttttggaagtgaagagtaaaatgtgttagtgggaactcagtattagcaagaagagaaataagggactatgctagcaaaatgaataatctgtctttattatactgtcacaggtggttatcaagatacagtttttgtgagacaaaaagctttgtggggctggagttgcttttgatggtggtggcagagggagagttatacgaatagaagtaacttctggtagtgtcttcgttgcatgtgggtacacccagtcttatgggcaagctgattttatataatcttgttcttttcagtaaattttgtatatcaaatatttaatcttacttctttgaaaaactttttagataagtgatgtttgcaaattgaagcatattgaaccatatatctggatattttgtttgattataaacccatttttacaccatggccatagagaatggtgccgtgggcactatcaggagtgatgtcattaaccccacagggctatgtggaaagcgtgtggctgggactgctgtgtggttgggacaaggcagtggtgcacatgggccagctcctgtaactttcctgtttgtggctctcatggggcactcctgctcctgctctccccgtcctcatccatgatacatactctctctcatctacgtgctcataaatttcagcagcaagaactgcatgatttttaaaattctgagtagatgcttccagcaaaggatttcctaactgatcactgccagagaagaagaggtgctaaatagttgccaagttacatgctttttttcccaaatgaagtacttcccctgctactgcttgtaaagccctgattgtgtgtgtgcgcagaacccacatctggtgctggaagcctaaggactagtgagtggtcatgtggtttatggcccctataaaaggacccattctaaaagtctccaagaagctaactccacaatgagatgatgtgtgtgtgggtgtgtgtgtgtgtgtgtttgagatagggtcttgctctgtcacccaggctggagtgcagtggtgtgatctcggctcactgcaacctccacctcccaggttcaagcaattttcctgccttagcctccccagtagcttggattacaggcatgtgctaccatacagaattcagattcctctcctacccctagcctgatgccctttcattagctatacaaaggtggttgagtttcaggttaggcttattatcgtttaaactataaactaaatattcaccaaagctagcccagcctaagcccaggaataatcaaggcagcttgaaacctaaaagcaagaggaggctgggttagatcagctcactgtataatttttgcaaaggcggttttattgaaacctgttcttttttgaaagctggctctttctaacattcaaatgcttttgatcaacctattttatggaagcagaatattgaaattaaagtaaatattagatgaactttatagccagttgttttcctcattcttcaactctttaccctacaaatcttatttaaacaacatgttcagcaagctgttatcttgcttacgcaatgaatagaacattatgttctaaggtacagtttgctcacctatgaaaagaatttaacctcttttctaagtagctatacacaattgtcataccttaagttcttatttagatgcatttcagaatattagagcattttgcaagtagatgcacgttcttacccagtgtcagtgtttatagacagacactcaccatgggtatatttaagtctagggtggtaaagaatataaatgtcatttattaaaacctgaacatagccaactatgaattatttgtgttaatgtaaacgtcgaatgagcactgcaaacatttgatgtttgaatatttgcctgtagaagtgcagtactatgttctatagaatataagtagatgccaccccagtcctcaaggtttcagtgaggtcatcattgtatcaataaaggtgccaatttaagatgctaactggacattggaaaaaatttgttgtcctattctgaaggatgagtcttatataaagtgtttttaaaatactttattgaaactgccatgttcttttcaattttggtagctcccctgcatttaatttagtcataagcgtctgtattaatgggtgtgttcaatatgaaggcatcctgtgaagacaataaattatattatacttatctagtctgcactctttatcatgttgataaaatggcccttaccagtaaaaaaactgtttcagaatgtgtaagagtaagtctgtctcagctgactgagggcttcatcatgttcatgataatcccagcagcttgaaatgtcaaactggtagctgatccatagcacacagtagtgctaattgagataggttggtgtggataattgaatttaattgaatattaaacaccagtaagtgctatgctagatgttgggaccacagtgatgaagatgacattatcctgacccgggaggcgctccttatgtgcataaactgcatttggaaattttcatgatttgagagtcatctatggttgccagtagagattttcccagaaggccaaggatatatggggacatttgactgttctttgaccataattatataactttttatttgcccagaatgaacaactgcagggtaacatttatacaaaaggaatttagtgtgcttagagtgctgataatacttgagaaactaggagagctgttttaaagcacttctttttcttttttttttttttgtttttttctgggctgttagaatttgacattgttcaactttaactttgtcctcattgaactttatcctgctaaggagctaaaaggtccatatgatcaaaaaggcagctctcaacccagcacgaaattccaggctcattcatttctgtttacctactgccaaataagtcagacaactgcatacttgctttacagacgaatagaggacagcatgttgttcaataattgtagtttaaaaagtatatgtaagatacatccacaagaagaaagatagagggagcataccgtttgtcttctagtataggctccctgcccatggagatcacagagtagaattatgatgggtgccttagagaccagcctccctcaggatcatgagttcacctcggcaccacagctctgggcaacgtggaattagacaaattaaagtagttaagttctgacttcatagaacagaatctaaacttttgttcatactgcttttgtgttcttgggccatctgaaaaccttttctgtgtaaatattcctgcaatatgcggtcttacagaggtcttatcacgcatatttccctttgcttccttatgtatcgtattttttcaagaagaagacattcaactttagagacaatggaatcattgtgttgtggctttaattcaggtcattgtccttttgtgagttgcacgtgtgcgcgagcctgtgtgttttgcttggaggaatagtgaataagcaaggagcagagtccatttgctttttctaacagagggtggggcagattctctcacaaccattaaagaaaaaaataagataccagcaataatgataatcagtcatgcatatgtaatcgtgtgtagttcatacttcagattcatatacagctgagcatgatcttgaatgttacaggaagcaagcttgaaagtcaagttacagtagaactttgctaattcatgcctgactaatttgcccacccagtagttcctactgaaatcttgccattcctctaccaactttcagaaaaatttgatagcaggctgtggagaaggctcatgttacttcttatgtcaaggtgtaaacaaaaaagagagcacaaaatacatccatcagaccacatgaagtgaagagagagaaaacatctgctgaaagccggattctctgtttttttcctgctttttaaatgtaatctgtctttgtttatgcatgccctagaaacatgcataagtaaccctgagtagtctcttagtttaagaaaacctactataaaatttcttgttgtaaaataaaattctaaaaggaataagttgtggacatataagtatcagacagtttatgtaagactttacataggatgcaaggtaggctgtaatatgatttggtaattgttttatgggggaattttgttttgtatagcgaaaaagaacagtgagtgatttaactgaattttatagtttaatattgttgttgttttaactaaaatctttggtttgctattgcaaaatgaaagagaaaggaaattttggttaatgttaactttatttccaaaaccatgtgatggatgctgaccaaatgtgtctcaatagtgccattgaggtctgttgcctttttttttctttgaggtgctaagtgaaatgtgttttgaaccttgaatgttcactatgcgacgttctttgcattacaggtagatactgcaaacttgcttcaaaaaaactaaaaagttcaaataactaatggttcatatttgttccagttagtaaatatcacgacaaggtatcatcgtcatcccatgttctcagtatagattcagcttcatttcttacaccacacacccagaggcataaatggaagtacacagacaaaaggaaaggcctgagtttaaatgtagttatcatgttcagtgttcgacattttattctgagaatttaagtgtttctactgcagtaccacaaagtcaatctgcatattactttaactagatcacttgtaaaaataaatgaataaatgaccagtgatggttcagtgacaagagtgccagatgagtcatgaatgttttcacaagtaaatttgatagtaaactgctaagtttactgtatacgctgtgtacaaattagctcagattcaagatttttgctctaacaactgaacgctcagttgcatctttaaactttttgttgcgtgagaggggctgaggggcaggtgggaggaagtcagcctgcaggtgggaggtttctgtctcaggattgctgatacccctgcatgctgctgggttgcagccttggagtatatggcctatgagacatggcatgtctgatttgatggaaaaagcagcggagaaccagtgaaccaagctattccgtgtattgactttttaatacgtttactacaagaatctgccttttaaagtacttttaaataaggttataaacataagtgtgttttggacacagcctgcagcaagcatgcctctcgaggtgtaagatgagtcagctacacatgctcaggggcccgttccaccagccacagtagctgcagagggtgagagcaactgaagcaagagaagctcttagtaattaggggaaggaagcctccacttgacaccgcatcaccaccaagtatttattgagtgtctttggtgtgcaaggcaggagaatatcttctatggattctacatatttcagggttaccagagttataaaatcccttgaaatctatatgcacaaattgtaaatacgtatgcagctttttataagtgttcaaattctgccttaattgtgctcaaggatcagggtctcaccccagcattgtataccattgatagtcatgatttccttagtgaaattaagtaaattgactttcagagactttatttcatattcatcatgtccccatgtagccatgaaaaaatgatatgtttaatattcatctatttgtatgattaaaacaaaatatccgcaactactgacgattcaatgatcagatattttactgtaaattaatatcatcataaactcctagacattagacttcagacattcagagcccactcgatgcttggcacaaagcaggcaccaaatacatatttatagaatgaatgaacaaatgaaggaagaaacaaagaaatgactaatgcaccaaccatttatcaggaagtttaacagggaaattcaacaaccagatttgttttgctaatcttattaaagtgcaacatgtttgttgtaaaaatagatccacattcgtcattgaactggacagtctaaaatagatccaaacccattgtttgattatacttcacaaatgtaaggtaaaatagatgatactatctgtcatttgcttgatgctattggcaaatgtgaagcagttaccagcataaaagcttggaggttactccgaatgtatataaacaacagtggctaggctcacaagtgggagagagtctaaaaataggtaggcgatcccttatctcgttgcattgaaaattgtgtttatatgaagtgatattattagaaatgatgtgtgagaaaagaatttctgcaatgtctcctacaaattagagtgagaaaatgtatctttatgcagctttgaacaaaggattattattgctggactgtggaccaaaattttagtcaagttttttttttttaatgaaaagaaactgttcatttatgcagacatacaactttgtgtcctatagagacttgtcatctgctcttaaagttagcaccctatttttcctctggatgtccactgagaaacccactggtgtgatggtcattgaaaaagagagttgtgtcagaatgccctaaaatcttagtggcttaacacattcccaagtttatttctcattcacactacccgtcaacataggttggcaggcattcggatccacagggtcacacagagaaccaggccgaccgacccacatggtcacacagagagagaaccaggccgaccgacccacatggtcacacagagaaccaggccgaccggcccacatggtcacacagagaaccaggccgaccgacccacgtggtcacacagagaaccaggccgaccagcccacatggtcacacagagaaccaggccgaccaacccacatggtcacacagagaaccaggccgaccgacccacatggtcacacagaaaaccgggctgactgaagtttgcactggagcttttcacagcccccactcagaggtgagataggtcaccttttctcattagccaaaactggtaagatggccttccctgaccacaaggatgctggaaagtgtagtcatcttttctctgtgcctggagaggagagagaagtgaaaattggtaagcaatatttctattttaaaagtggttagagtgtagtgcaatgaatctagcaccattggttcagttttaaatggactgattccatttgtctaattctgtgtcagttggctgttttctgacccctgagaataatttagtctggctgattcccccattgtaccaattgcctggcatatgacaaatgcatttttgcctgtaagacaatctttgcctaggaaagacagccctaatttttatgtcttgtattttccagtaagctaatctggagtatcagtttttaagactgatacacaattagatgaaactaattaaggacaaaacatttgccacttttaactgttgataagtgaaactgagatttccccccaccccatggatacagtgaacatttgtcagcagctggtaatggctagtataaagatgtattcagttttcccttcccttcctctccctccagccttccagccacccccttcccaaacatttatgctcatttagagaaaagcaaccccagttctcttacctgggatatcaccagtataaaaagcacattcgtataaattatctggcctttaattacctgtaaccctgtaggaaaccccctgggaaaagtaccacaaaagaacgcagctctgggggtctgtgagaggcacccagttcacacccctaaaggacagagcgagcactcaaacgcacagctttgggtgccctctgaggcgtgcactggctggtagcagtgggtatcaaccatggaagttcacggaagattaaaccgcaagttcccacgcaaggccaagtggctgccaggacttggaggcactgaccctgagtggtccttccacctcagcgtatactgtcactgctgcctctgtggcttcccctttccctccaagtagagatagatgtctcgaggtgctccccaccccagccaggttgtcctctcctgggtggcattttcctttctactctctggggctttcaccaccccactgggcataactctccacaggctcccctgggaggggtgcccccacctcacccgccacctcacttctcagcccctcttcccatccaagggctccctgggctgcccccaccctagtcatgatctcgctcctctactctctcgtagtactttatttttaccttgctcctggctcacattacatgcttatcttgtatttatagatggttctatatatgtctccttttgcatccttttctcaaagctcctgtgaggccagggatggttttatgccttttctcatccccttatgttctagtataatgctttacacatgattaaattctcatcagatgttgaatgaatgagcttattatgcattacttcttagtacaaagaaatatttggaacgtaagctctgaaatgttgatattctgtggatgcttggattacatacaatgtcctaaataaacacttgcctgttaagtagaagtcagtctggaaagtgatacctttagatccataaaatgtttataaggcacatgaatggacaaccacgttgttttttgctcttttatatgtttaggttactgacagcccaaaatacattagcttgtctttgggctaggaggtacctaaagttgtatttttctctcatgtcattttcctgggtttttatcatatccaacttcgtaatgtccaggaatttgagattaattcctcaaacttgtcgaataatacaagaggaaacttgtataatacagagcaaacttggttggtgagtagctgctagagcaaacttggttggtgagtagctgctacagcccatacatggatttgtttcttcaggtggggggataattgtatccatggactcttcttcattaactgacggatcaaattattttatgaagctatgatgagaaatggcttgtgctcttgggaaaatcaatgccaatgtaggtaatgcaccagtctagctggtttttaatttaaagaacaaattatcttctggaatagtaataaatccccctttggaacagcaagaagacatcagctgttggatatgggataattaccatatgtttcaatgtcgtaaaaaggcacagcaattttaataacccaggttgtgtacaagaaagctcttgcttctgaagaatccatcaaccatgcgctatgatcatgtaataataaactgctgtttacttaatgctgtttttatttaaagttttaattaacataacctagtctttgcaaaacatctgattacctttgactcatatgttttctggtatataataatgggttctcatgagttgtttattttataagatctcctgtttactcagagtaaggaaaattttttttgaggtaaggtcttgctcaggctggaatgagtggtgcagtctcaactcactgcagcctctacctcctgggctcaagcaatcctcccacctcagcttcccaagtagctgggaccacaggcacatgccaccatgcctgactaattattgtattttttgtagagatggattctcactctgttgcccaggctgatctcgaactcctgggctcaagtgatccttccaccttggcttcccaaagttctgggattacagtcatgaaccaccatgtccaaccaggaaattttggtattaggaagtttcccacataccatttgtctttggtgccatgaacacctattttgtctaatttttataccaacctttcactttggcacatgggaaatctgataaggaatcgatatcacggaaatacacatcacactttctgcttgccgctttcttccaaaataaacccaaggattccccttttccaccaccaccttaatttagataaccaagataaatgagaaggttttcgcacttgatggtgggatttcttatcaaggctattgaatttggtttggcactgactaattttggtatccatgtgtttttagagtaagttgtagctagggtggtggggtgatggggagactctcactgaatggctctaaattcagtattttattctttaaccaagcagctgttcacacacatttcttaggaagtggctaaataaaaatatggcagccctggaatgaacagaaactgttgctctttcaaaaaccagcagctacaaatagtgatttttcttccacaaatacttgtttttctgtgacattctcattggttttattcagttaaactcccagaccatgttgatttttttttgccttttattttttgagctcataggtaaaaggagttgaagtgattttattttctgtttttgtcttttttttttaagtttttgtagagacaggggtcttgctatgttgcccaggctggtcttgaactcccgggcctcaggcaatcctcctgcctcagcctcccaaagtgtacccagtctcaagtttttttcacattatatatttgtgttctttctgtttttaactaatggtctccattatttaggctatattaaaataacaataaaaacagagcagatacaacagaattcatttggttggccattggagctgtttttcctttttctttttaaactgactttatttttttggagcagttttaggttcagagcataattgagaggaaggcacagaaatttcccatgtatttcccccacacaggcacagcctccctcatcatcagcatcccccaccagagtggtatgtttgttacagttgatgagccgacattgacacatcatcacctaaagtccatagtttacactagggttctctcttggtgttgtacatgctgtgggtttggacaaatgtataatgacatgtattcactattatggtgtcatacagaataatttcactgccctaaaaatcctctgtgcttcatctgttcatccctaccatgcccctaaaccctggcaaccactcatccttttactgatttttacagttctgcctcttctgggatatcatgaagctggtggaataatgcagtgtgtagccttttcatagtggcttcttttacttagtaatatgcatttaaggttcctccgtgcctcttcatggcctgatagctcatttctttttagtgctgggataatattccactgtctggaaatgccaccgcttagttagtcattcatctactgaaggacagctgggttttggcaattatgaataaagctgctatgagctttttaaaaaatagtttaaatgacatatcaatactttaatatttaaaatatctcagtgatcatatagcctcagaaagcacagttttctgagctgggtgtcatgttgagtggtgttagagtgccgtgctgcgtgctcaggtgctatgctgtgaggaaggatgataggagcagattctgtataagcagatgcacaaccacccacagctgcactttggcacccagggcagacaaataaaaagggggcaagatttttttaggggagattcctggcagatagagattttcttcagaatgtacagatttatttttggggggtggttaggggcgacagttgttttaagcagagttttgaaggagtttggtttggtgagtgaaacagtatttcatttttgattgcctttgtttttccagcaagaaagctactcctggtctgtgggcacacaccaaaaggctttgggcaagacagagggagcttgtgtgtgcccccagaccggagtcataccacagttgtcagatcactttgcggcagaccttccgacagtctcctcatctctcttgtggaatttgagtttgacccacaggtagcattttttattttggtggtaccctgatgtttataaggaacctcaggacactattagttaggaaggagattgtcccatgcaattcagccttgcaagagcttcctggttgatctagggacaaggtgtctatcactcagccctccaggtcttttcttcctaaagcaggctttggagcaaagcctgaccggtctttgcctatgactgagtttcccagggctgctgtaccaaactactaccagttcaacttaaaacagcagacatttatcctctcacagttttggaggccgcttcaaagtaggtgtcactgaactgaagtcaggatgtccgcagggctgcgctccctccagagcctctaggaacacatctgccccttgcttcctccagcttctgggggctgccagcgggctccagcctctgccgctggggctgccttgcctcctctgctgtgtcagatctccttctgcatctctcttacaaggacacttgtgggccgggcgcggtggctcacgcctgtaatcccaacactttgggaggctgaggcaggtggatcacctgaggtcaggagtttgagaccagcctggccaacatggtgaaaccctgtctctactaaaaatacaaaaattagccgggcgtggtggtacgcacctataattccagctattcgggaggctgaggcaggagaactgcttgaacctgggaggtggaggttgcggtgagctgagatcgtgccactgcactccagcctgggcaatagggcaagactctgtctcaaaaaaagaaaaaaagttaaacgagtgtcttggcactcccctgtaatcccagctacttgggaggctgaggcacgagaattgcttgaacccaggaggtggaggttgcagtgagccgagatcacgccactgcactccaccctatgcaatagagtgagagtctgtctcaaaataaataaataaataaaaataaacaaggacacttgtgactgcatttagggcccagaacaatcccccatctgaggacctttcatttaatcacatctgcaaaggcattttcatgtaaggtaacattgaaaagtttcaggggtcaggacctaataaattttgtgggccagtattcagcctactgtcccctagttacaacaaggatggggcagcttatggacgagagtgtcaaaaaattcagattctgtcctacagggatcatcttaccctgcagctgagttgagtgattattgagaacatactacgtgttgatgctgttgcttagcactgtgggagatacagagatacataaaactctgcttgccctgaggttgcttgtggttttgttggaagagaagacgtgtgtgtaaaattagtcataagaaaaaggtcgtgtttgatcctgagagccagatagtggtacccagcagtgagcatccaagcccttatctcccaaataggagactttgtaggctgaaaactggcccacagatttattaggtcctgacccctggaacttgtcaatgttgccttacatgaaaatgcccctgcagatgtgattaaatgaagggtcccggtatggggggttgtcctggatgagctgagtgggccctaaacgcagtcacaagtgtccttttaagcccctgctgtgcctgttctcttggtaaatatctctgtgtgctggaacatttgaccagagagagatttcggtgatcatatccatatttgactgtttcctattccataatttgtcgctgtctccgagtcttttcccgggagccccctattacaagtgcacctttctgtgtttattcttccctgttgtgcttcgatgatcccttttttctattcttcagtggctttttctccagtaaaatagcagtttaaattcttgaagggaaacaattaaaaaataatgtctctgggttaacaagtatgattaccgtcatctaaatcagtgatactacatgagaataaaatcaaggagacttacatttacagtagatgaatctatgataatatgccctaccgttttgggtaatttaaatttatgctagttcactctgtctacatgcatgtcatatcttagtgtaaattatagaaatatccctataaaagaaaaaataatttttttctgtatatgttttaagggaacctgaatttctttgggttgtaatgcatgatacagatagtattctgggaatacctgatgttcagcttatccctggaaccctggttatcttagtaaaatatgcagcaacaatatagaagacaatcctgaattttccactgcacaattagggcttgattcaccgtatgacttgggcaaattacttaactttttgaaaccacacttttctgattttcaaagtatgactaataatggtttctgccttaggattattaagatgattaaatgaaataatgcatgtgcaacgtttagaacattgctttaaagtttgtcttttccttctctctccccttttttcctttaaaataaacaaacatgtttgagggctgggtgagttgatgggctccctttagtgcagcacttctaagtaatcactgttccctctggttcattccattgagcacatgatgacaaacatttctggggatatcatgtcaccttggatatagaacagtctcctaaattacattttatatgacaatgtctcactgtatttttgtcctcttgaattgcagcatagcatattatttcttccagcaaaaagcaaaattaaataaataagtgattaagttgctggctgtagctgatactgattcatgacatgactgaggattacttagccatcacattgaattgatgacagttgccttctaaatattatctttagtcacatccctcgaatgtttgcagtgactttcactcctcaactagaatatgcacgtttacatacacatgcgataaggctgaagaaggcttgtggctcagcacaatttggtcttgtatgcacagtaatcattctgaagtgtatgattctgttttattagaaattctcacttgaatttcaagagaataaaggaggattcctcctacacaaagctgctaattgtttgcacactgtgtgcatcccgcatgataagcgatttgagaaggtgccacatcagtgcctttatccaagtgtcacctcctgtctacagttcccttagcagggtgaagggagaaagatgcaaagactgagcttggctgaaacaaatgtatttttgtccccttgacttcttgaattgcagcagagcatatgaataacattgatatatttcttggctgctagacaacaacgtatttctttgacagattgacgcctgaaaagaaaaatacagtatgtactaatgaatcaaaacattttttagtacctttgtgtatactaaatgtattttagtttctatctggagctagttgccatttactgtgggtttgaaatgccctaagttatcttctatggatgggtagaatcaatttacccacacattgacagcttttacagataggtcctgtaacagatataattaagttaaatttcataaatagataggcagtctcctccccagtcctggtccctttgggagatgaattggggtgggggtaatggagagtttcaaaaaggctttccggtgtctttttttaaaaataaggttttaagagtttcatggtcagctgttctcagtttttctcaagatggtatccaaagtaaggctcaaatttatgatttatcttccaaatgcttaaatggtccatttatgatctgccagatgttacaatgactagctccccaaggaacgatcaagaatgtgccaatgtctgggcaagatttttatccagcaaaaagaaaaaaaccataagaattggaggttttactttgaaaagtaaaatcagccacatccatgacttaagagactgtacatattgtcatgggtaaggatttagatcttggctccactgcttactcacagtgtaccctggacgagttactaggcctttctgtgttttactatgctcttttgtaacacagggagagatagcatctatcttctaaggttgttgtgaggattaagtgaactaacttgtgcaaagctcttagaatagtgctgggcacagagtggtgagtgccttgtatatgctaatagttgttgatttatagcttaaaattaattgtgtgatgcaaataggagggttaccaccccaagcttaaatggaagttttgcagcactttgcactcttgaggatgtatctgggtttaatagtaccttccatctagtgcacaagtcttctcccaggctcatcctcccaaacacctctcagtgttatccccactttgcaaatgcagtagtagctgggctcacagaagttaaataactacaccaagtcaccatccaaaaaggttcagggccaggaatagagcgaaagacagaatacggagccatgctctttttgctgtctttctcagtgctcagttctcagaattactcaggaatgagagcagagaaactctgtataggccatgcctggagttttttgcacatggcagtcagagagtcccagctcagttcagtgcagtattaccgaattccagtatatgctgggctctgttaggtgcaaggggttccaggatgaatgagtctgtggcccagtggacaaggtttgcccctgtgtgcagctctgtctgctttactagatttgctcctcagattctaaattggaagtatgtgcatattgcttgatttacagattattagagaatttttttcagttaaactttgtccaaaatagacactaagggcaaaggaaactggtattattacagcagggtgtatctcataagctctgagaattgtacatgtataaagaatctttgaatcgccgagtcttagccccacgttttatacagcacagaaatacagcacagaaagtttaggtgatttcccttgggttccatagtgtgttagtcaccaggttcctttaactctctcagtactctttcctttaaactatggaagagctcaaatgattaaatcaataaaagaatgacaacttatagagctcatttacgtgtctgaatatatcagtttagcccagagtatctgaactcctgggccattgctattcactgaccccttctcctcctcgtgttctagtaaaattcagcccatgaatatagtcattagaagttgaattttaatgaaattgggcgctttgatcaatgggaaggttgaaagttatgtgggaatcatctatatagtttatagctgtgactatgtaggccagctcctaagtgccccctgcaatgtgtcactctctctggttttctttccagggaggtaccctgtagaataacagtctaatttacctctcagacatctgctgtctttcagaccttatgctagttttgtgcatatcttcatgattcctctaataatgcattggattataaactattatctccacttgagagacgctcagagaggctagggagcttactcagggtcagagggagtgcagctgaacagttctgccagggtccctgtgattgttggagcagcctgtgttttttcaagctgttgtctgtgaatcgtacggtagaaacatggtgcgtatttctgcagccttagttctagccattgaaatatcatggagttgaatgcagaatacccattaatgtttaggatgaccaagaaactgtgcccaggccccaagcccagctctgtcatcagaggtgagttaccactggtgccatgccctttgattccctacaggcgccctatggaggtgcccaccagtgtgcacttggaagtgtgatggaacgcatcacatccccttgttgcccctgccccggtgatagggggattcactaagaacttcagcatagtgagagaatgtaactgaagctcctgggttagtgctgcttggtatcccagttactttgtagatttcggaatcttttgtcgtctagcctgaggattactgttgatgacacaattttctttgggattataggcttcatgtttcatacaaccagcatatacgtaaatggcctcttcagtgtatcatgtatacacattggtgaatagcttcccactagataatgttttaaaggggaaaaaaagaagtcatttctaaaatcccaagagagtgtccccgttttgaggttagagcacgttttttagccttatttagtcttgcatcttgctccttatgctacctttcattgctttatgaaattattttttaagggatactttctaacattccatcccactttttttaaagctcgttcatatactttgtcctcacagaatagaacagggtttctcaaattgcacacactgaactctgcaacacaacagttccttcattggagaccagatgaattgaaccactggctttctgaaaataactgtatgctttccagttggccagccttggcagggacccactactactcctatttctcaacagtcaatttaaaatattgacagtagcttaataacattcaatagtaacttgcagcagcctttcatataccctgacatctgagatatgtaccagtttatgaaatagaacacgcagatggtcttagccccattttccagatgaggacccttgtccagggaaggattggtgcccatttagctagctctttcccagcaagcaacagtacccaaggctccatgccccaggcctgggaggacccctcccacggcgtacttcagatctccacctgtgactttgaacacatgcttcgaggtgatgtacttcttggagatagtgctttcctcatctcttctaccttgtagtcgtcagtagagggcatgcagtgcaacagaagtggatttcaggactgagactagggtgaggcaagagaggcatcagaatgcaaaagtgaagtagacacctgccgtcagcactgggcagccctgctcctggggccttacttgactcatcctggtgggttttccaaatggcagaggtgcacaaccacttcttgcaagcatgggcacttgaattgtagcccatgtacacagtgattcttggaaaaagtcatgagtaatgaatggaacttttctctcccaggttgatcttgtgttttgagacataaagagtcaaaggttggtgcctaggatgctcattcttattgtttttggtagtttgattgttgaaggcttttgacacgacattgaagtgaatatttggggcattttgctcctctgggcttttctctaaagcaccctcacatttcctctctcatgttcctgggctttcctggctttgatgctagccccactgtgtgttcccattaatagccctatgtagcctggctccttattctggaaactgtgtaacttttgctcttgatcttaaacacaactcagtcttgcaaggagctccgcctttggtctcagcttcttggggatttccctggcagccacatagtgaactatgtcacactctctgttttacccgttaataaggaaatactctggtacatggagctttgcttgctgatctttttctaagtactctgggggcaaaaggaaaagcagctagaggataaggatgtaactttcttcaaattaagccatcctgacccgtggtagagattagccactaagaaatagtggaaacaaataactgtttcactcttgagtgttagcatggaagagattctggttgaaatcctagtcctgccactttctggttacagaaacttacattacttttcttttgatgtttcaaggagataggagttaaagaaaaatgaacaccagattactagaacattcttatagagttgcccaaagatggaatggacaccttccagagtggaggggagggagtaggattggacagtagtcctcaactgggagcacttcttccccctgaccccacacctgcctcccagggacgtttgacagttttggattgcacaaaactgaggggtgagagttgctgctatatctagtgagcagaagccagagatgcttccaaataccttacgaagcataggacagccctcacggaaagaattatctagctccaaatgttaatgatgctgactttgagataccctagtcagaagtaacatttattggccaggggcagtggctcatacctgtaatctcagcactttgggaagccgaggtgggaggatcacttaagcccaggactttgagaccacctggacaagaccctgtctctacaaaaaaaaaaaaaaaaaattagcctgatgtggtagtacatgcctgtagtcttagctactcaggaggctgaagtgggaggattgcttggacccaggagtttgaggctacagtgagctatgtttgtgacactgcacttcagcctgggcaacataacaagactctgtctcaattaaaaaagaaagaaagaacatttgttgaatctaattttcccatgtaatatcaatgactgtgcaagataaagtggtttttatcctcactttggatgagattggcctttggtgattgagaaaccttcctttggttgttcagctacttctagatagacatgggattttaaactagccatctatatgtccaaaacccatccgctttccacaaacccattatgtagttagctccccatcactgatgatgttcaaagctaagcagggtgagcaaccacttgaaagaggggatggatgaggatacaagcctaagatgtatgttgcactaaatgacttttgaggtccctcctaaagatcacattctctggttctattttgaaatgggatttgtctttttagccccagtgttagagtggcagccagatatcccttggctatgaccagtgaaatccctgtgctttgtgcacctgtgaatcttactcctattaatatcccagccctatcaggccagagggctagggttccaaacaggggcagccagaaatgcaccatcttctgcatcccatctgcattccgggcccaggcagttatttttacctccatatgtaaatgggcccagcgatttctcatttaggagaacagcagaggcacaagtgaggagagctggagaaggaggggaacctatcatatactctgagattgcaatttagtatcagtttgctgatcagtgtcactccactagtttaataagtaattatagtttctcttttgtgaacaaggaaaacgggtagcttcacccagtggttgtcagccctggccaaaaattagaataagatagagggcttttaaatcacacctacaactgagcccctccaccagaaatttaattttctgaggtgaggcctgggtacagtgatttgagaactttgcagggattccagtgtctaagcagcctgggcacctctggttaatggcacacctcagtgctgcgcattctgctccagtacctgctggtgttactctgtcataaagagactagaaaaagagtgagttgggccctgtttctcagtgtgtcttcagtggattgtagggagaaggaggcccatactctctgcctaaacgagcacctgctagactccgaaatctagttaatggaagtttctcctcatccttggacatccttgttttatatggtatacgttcaaaatacatataatctttggtttaatttgttttacaaagttttgaagttttcctctccacacttttctcatcaagctggtgtgtggaaagaaggaatttttcttttccattgctgtcatctaaaattgttgtgtcgggtggggaggggagggagccgggagacttagctttaactacttagaagttttcagggaaatgtttttataacaacctagttaatagtttgactttatgatagattctgttccttcattattttgtcctccagtggcttttatacccagcaaagtggaccatggtgtatgattcaagaagggtgaggagtatgtctttctttggaaaggcagggatggagggttgtgatttagaaagggtaagcaggaaaggagagccacagaaggcaagcactgttctcatgccagatcggtttcaaggaagaggacatatggaaggatctagaaaatgatttctctagaattgtccatgtccaagtcccctggaatgtctttgtatatccccagagctgtgcatgctccagtttgaagagctctgctttaaaagatatcaggggtgggggagatgaggggggtgaagtaaaagaataaaaactattcaattccatttgttttctctttcaagctcatacgttactcatttcatttttatattaaaatatagatgaggaaggaagggcacatggcaagatttggcaagcataatccatgaggggatatggagttggggatggcagcatagcatactaggatttttgaggagggattcggggagcctgttcatgttttccttacaactctggtacatgaagtacaggttctgcatcatgatggaagactgcctgggttcatgtttgggccactacctactagctctatgactttgggcaagtttctttcttcttttttttttttgaaatggaattttgctcttgtcacccaggctggagtgcaatggtgcaatctcagctcactgtaacctctgccttttgggttcaagcaattctcctgcctcagcctcccaagtagctgagattacaggcaaccgccaccacgcccggctaatttttgtatttttagtactttagtacagaccgggtttcaccatgttggccaggctgttctcgaactcctgacctcaggtgattcacccacctcagcttcccaaagtgctgggattacaggcgtgagccaccatgcccaggcaagtttcttaacctccttatagcagtgtttggcacatgatagatgagctacaggttggcttgttattccttgcaatcctgagtttctccccagagtaaagctggagcttttcccccagccaactttggtggagtccactgggcagagatgtgatttcagccaaaatatggctaaaggaggaaaggatctgagacagccaggtggaaatggctccccgggagagcctctgaccgacccgcacactgggaggagtgcgcactggggtggagccttgggaagttggagccatttgcagcagggaggagcctggcccctcgtcttcttggatggtacctaggattcagtctgcgaggcaggaagcacactagcaggactccagcttggtggagagttcctgctttcctttttttcctttttgtccaataaatcccatttttctcaccctttaaattgtgagcctaatttttcgtagtcatgtgacaaggacccctcttaagctgaactaaggaaaagtcctgcagcagatctaactagaatgccaatgcctacattgaggctgtttaatggagagtttatgaaaagttagctagtgtccttgtgtaaacctgtatgactctagttcagagtcttcagtaattgcaattcaagaataaaaccacacggcacttccattcccgtgtaatttgttgttgctggcttgtgacattctacatatcccaactatgagacagccaggcagtgggatggactgtgaggttcagatgcccggagatatgtgaggaagagcttttagcaataaatatgaaaatgaaatcaaagtaaaaactggcattgaacccctggtgtacttaggcttacttttacccaaatccaaatcatttcttgacactgcatggttaccaagagtgtctgtcattcaatatttcagattaagatctgttctttggtagctaagttcagagaaaaaaatataggatctagaagtatcattgctattttttccttgatacatttagtctggtattaaaattgcttgcagaagatttgattttaaaaaagtagaaaagagacacttatcctggtaaaattatcctgaaatcttaagaaattaagacaaattgcaccataaaaccagaagcacaaaattaaacaatattatattaagagaacccagtgacacattttccttctaaattaactttaaaattaacttttaaattaagttcaatctcatatcagtttgctttgtaagaaatagaatatatgtacatgtttgccttatttttagcatgttatattcattaaaatgttttagtttattcagcagatacatttagcatttctttcacaagaaagacagtgaaggaacaattaataacaggaccccagtaatacctggggggtttctacatctgcattttttgcaaaaatagaatagccttctaagaagctgtcagtggcatttgtgcagctggacagctttgcagcagatgtaacagtaactgtgatgccaggctgtgccccagaacctgtaagcatgacaagctctggcttcttccctcctctgaaaaggtacaacattgaagaggcagtcgtttcccctagatctgtaaccaagcacatctgggtgaaaggggaagacatctcttcacagagaggagaataaaggcggtgaccatcagggtgacaggcagcatggactgttgccacctgtgctgcaggcagcttcagtgcctggatggtgggacagctggtcctgcactcagcacgagtctcaggcagtggtctggccgcgcctcccttgggctgcttcttcctccaccgtcctccacttttgctttgtgtctgcgtcaagtcagtaacgttggtctgcagctcccatccctcctgatgggcactgcactgaggccttagtgggcattacctgatgccctcatcacccagtgtacaaacacctgctgacaagaagcgtccctgagcggaacccttctgctgggacaccgcaccttccgtgtcctgagtgggctgcaccctcgtggtgctcaactgggtgacttcacgctgtcctcagcgctgtcctcggcgctctctctccagtcagctctcctgctcaggcacctttttgggacacagtccttgccagttattccctgtttaatgtcctcatgtgtcttcacttgccctgggagactgtcgtcttgagagagcaagccatatgggaccctgaggcctggcctcagtttccctcccccccactgccccacggggccacgcctcatcagtggcatggaccttttagtcagcgagccctcagccggatgctcccgtgctggccactcctgtcatccctgctctgtcctccctgcaaactcctccctcaggaccctgcttgaagttacgtcctgcacagtcatccctggccttccctcagcagaatctgtcactccctcaaggtgtccctgcagtattctgctcatgcccctgctacgtggcagaactctgttgtcctatcctgtccagagctccaaagcccccagaccctgtggctgctgagcacttgaaccatggacagtccaggtgaggatgtgcggggagagatgcctcctgcctgtggctgagccctgcctgaaggagctgatgaggaaaagctcctaagcacaacagtgctgctcacctgggcatctagttggcagagtcctatcccagtgttcgcacccccagtttcctgggtcttaagttcagattatcaagtgctcctcctgcaaaaaaaaaaaaaatggtgattcttgtggcccttagttgaccccgcacctgggatatgcttatatttggtgtggggcagagaactgagtgttcttgaaccacttccacccaaccagagggaggtggggacatcaggtacacctcatcccctgatgtcacagccaagtacctggagccaccaggactccctctgagcccacaaaggagtgtcttctcaccaccccgattatactggtctagttatgctttggagttaaagccaggctgctattgcagggctgctgcaatccttgcaagcacagttgttctttgcttgcgcttgctctcgctctcgctctcactctcactcttgctcgctctctttctctctctctgacttcagtttaactttttaaacttcagtaataagtgttcctcaaaatagatggtcttcctggttgtaggtacagccagcagggttgagttctgctgccttccagcatggttttcctggggcctgtaaaagtcctgcaaatttgctctgacactctgttgacatggaggtcctgtttgttgttataaataaggaccagtgtctctaggacacaccttactgtgtataactgaatggcagattttgtcccttacttcttaaaaattaaatggcagaggagctggccatgtaaaagccctgtgtgtgtttaccaaaaagtacttgaattttgtttgggttttgtgttctggtgcatatgaagtgaattttggtaggagtatgtgcattcagagaatatgtcatcacacttttttctttatttgagtgccacttggctcttatttgattaaggtaatttcagtgacatattttgaagcaattcaccttgaaaggcagaggcaccacccaggtgcagaaaccttccttgggttatgcaacgcccagcgtgggtggaaccgcactcacactttacctcttcctgaaccacagccctgctctgattgcatgatggaagctgaggtgcctgacaagtggaaggaggaaaaggaacattctgccttccttttctctgtaatgccaaagctggcgtcatgcattactgagggcctctgtcagcactggggccggccagtggcacagctgatggggtagctgcactcgctagtcctctgggaaagcccaggttgtttttctggcttagtgttagaggcagctgtgatgtttacctcgatctgtaacatacaaagatctgatcatatgctgtctttgcttacattctattattgtctgacttatgttctaaattctctacaattcccttccatttgtcttaagaaactctaaacctttttttttttggaaatcactacttaatgattttgaggatggaaccccagacagttggtaatagtggatggttttccttttctgtagttgagtggctttctaattcttttgatggcacacaaaaagaaattaaccttagatcacaacttagtacacacatttatgtatgcatgtaactgagatgagttcctcaaaatagcacatacctgtgttttatgtgaggcactgatattttctgttctatattatgcttaactttaaaaaatacttcctgtgtaccatttgtgggactgtaactcacaacttaaaaaatattaccttgatacatagctccagaaatacacatgggtcattttaccaagaatcaccagtgcttttgctctgttaccccggctggagtttggtggcacgatcatagctccttgcaccctcaaccccctgggctcccagctgggggtctttaggaccccagcgtgacctgtgggtagcccttacttcctttaatacttttcttctgcacagtcaggtgctctccctttgagcttccgtgtgaagttcactgtgcacccagctctgctaccaccgcctctgtcttgaaaggaatagggtggggtggtcattggtgtatagtaagattcgaatcacatccttcaagtacagttctaccctaaagataagagtccctgtggtttttgttgttgttgttgttgttgttgtttgaatggatgtgttctttgagaaattgagtcttgagtattttgtgaggacatctaagcctggcgtccacgtcagtgctgacagatttgacctagtgtgcactcccatctggggaaatgcccataggctataatctctttcactggagcgattataatagcccccgggcttcaggtcccagtggcatccacccttggtggcagcatacccctctgcatgaacagggcgcccacttgtcccctccttcttacttagtagtgatttttaaatgggagggtggcagtcctgaatgtagttcatcagtatttaccgcacaagctctaaaggacacagtgttttatttgtgtatttatttaacttttccaatatcggaatatgaatttttgtttcacctgataggacacgtttcaggggctccattctacattgtcatttcacaggaaaaatatttgatggctcattagaagggaacatctattattttgttactgaaaggcacattttcaaccttgagaattggatggcaggtaatggcatggaaattgacagcattttaccacttaaaaataaccacaagaaataccaatgttcaccgaatgagttgaagttaatttggttttgtaggctattgtagttaacttgatgcttgatggaaataattttgtattggaaatcattaaaaattgatttgattaatgcttttataatgttggtatgaggtgttgcactgtggtggtgatgacctaagggtgctgtgatggcctcaaacgttgtccctccggggcccacaggcaggatcccacacactagcacacctcccagttcctcttaccatcaaacagaggtgttccttcaacatgcctgctcctccctgtggcataaaggcaccaggaggttctctgatcccctgttagatctcctctgcagggttgaagacattttttgtttgtttgtttgtttgtttttgagatggagtcttgccctgtctcccagactggagtgcaagtgacatgatctcaactcactgcaacctccgcctcccgggttcaagcgattctcctgcctcaacctcccaagtagctgggactacaggcatgagccaccaagcccagctaattttgtgtttttagtagagatgggatttcgccatattggccggggtgatctcgaactcctgacctcaagtgatctgcccgcctcagccttccaaagtgcttagattacaggcgtgagccaccgtacctggccatttttgtttttaatcggtgtagtgtccctaacctaaatatttcacatggcctgaactttctgtagttttagcagcaatgggatgctttgaaacctagatctctcaccaactacatcttccattgactggtgaaacactagtttaagccaattcattttgaccatgtgcatttttgtgcttgatccctattttatttcaaaaataatttccatctctattcatgtaaactaataagagccttccgtttcctttaatggcaaattgtctcatcttttactgttttaaaacatttttttaacatcatgagaaaacgtgataaaaggtataagtgtagtttcctggcttttgcagtacctcagggaattcggtaaactgtattccatttgaggaaaggaacggttggagtaggaggtagtgtaaagataacatagcaaataagcattttaccagaaccctctgaagtctcatcagactgtgccatcatcagaatccctcccttctcatctacaccgtttaaagccagcatccagtcagaagcccagagctggtaccgccttgctttcctgccagttgctgacatatggcacacagtgtcagttaagggcacaggctgatgggcagcttggccacatacctctctggcttcctatctgtaaaatgggcacaatcattgtacctgcctctgaaggttgttgcgagaactagacgcagccttggcacagagcccacagagagtgagcactgtgtaaagactggctgccagccattagtactgggtgcctgtcttttggtgtctgggcaaagctttaacctgttttatcagtttagaactcagatgtctccctggcaaaacaacacgggcatatagatattttgtgaagttttgttgaagtgcacttaggttaatgattcatgggcagcctttcaaagctatcaggctgtgaaacagctttgaataagattgtcttgtccttctgctgattgtcttttccttcccacattagcagccatagcaggaggaggagaggtggcaagtggccacactactctgctcacattaagcagacaatttatggtcaatattcagtgaatttcttttttttatagtacagttaactgatatttatattagctttaaaattatagcaaaatcaggccaggcatggtgactcacacctgtaatcctagcactttgggaggtcgaggagggcagatcgttggaggtcagatgttcgagaccagcctggccaacgtggtgaaaccccatctctgctaaaaatacaaaaattagctgggcgtggtggtgtgtgcctgtagtcccaattactcagtaggctgaggcaggagaatcgctttaacccaggaggcggaggttgcagtgagctgagattgcaccactgtactccagcctgggcgacagagcaagagactctgtctcaaaaaaaaaaaaaaatagtgaaatcagccaaatagagaactaacaggcacactgcctaattccttgtgtaactgtcattggtgtgagtcactggggcagcgtgattaggtctgtgagctggatagcaaggctgtcattattctcaaggccttctgctgactgctgctcttggtaagacatacagaatctgtgggcacctcctcttaccgctctatgctagatgaggcgtctccacgttgagttgtagtagatacagctaagaaagtaaaagaaatgaaaatctcatcaaaaggattggggctagtctcattcttcatgcatacccaaaccgtggtaactttgatttttttattatccagaatggattgtttagaggagacagatggctttccagttcatcaaattttttcaattatctaaaaggaattcctacgcttggagcaagtcatttcaataaatctcattcatatttacctgctgcttccttttaaatggaagaagagaatgtttttcaagtacacttgaaaaatagcatatgtgaattagaaacttcctctgtaaactagcagagtagaaataagaggccaggattcagcaccaggtaggctggattccttcttaggtggctcaagctggctatggggctggtctcatcatatctaaagaactgcccagcttttacgcattttgaatgtggtggaaccagctgcatctttttatatgagagcggcaaatagtcattgtgttccagtttgcttctcgggtcatctaaacatcagaggccatgccacaagcaccgtaactgagggatatagtgtgactgtggtccaggccagtgacctctggagctgaatcatgacttcccagatgactcccagagcctgagaggggactggtgcgtggctccaaatgattttcacctgggcctctttgaagtcgggagagatacgtgcagtatggtagatgtggagagggagaggcatggtgtgtccaaaaattagcaggacctgatccatatacgtggactctgaagcagtgcacttactagattaaaaaaaaaacaatgtacttactggatttaaaaagtgtgtatttttttgtgagatgcagtttgtaagatgcattggtaactaggccatatactttttccattggctctcagctctcaagaagctctttagtttttagcattggatcagtaaacacttattaaaatgttcccagcatttgtttgccatcttctctttcagctgggcccagctgtgccctcaaaccctgcctgtctcttccctgactgatcatgttctcccagcttctacagaggcttccatagcattgtgcttggtagcagacaccagacagaatctcagccagctcagtccaggcgcacgggctcctggtctcccggggtgtggttactcgtgtctcctcggggccttccgccctccacattccagtgccaggccctggacctttgtctctattcatgataaaacatttttaggaaatgctgacgctcagtgaagaaatggaaacactaactctttgttctcttcctaacagacacgagacgacttcctgggccaggtggacgtgccccttagtcaccttccggtaaggacagtctcatgtttgatgcttcgtgctgggggcgggggtttctaattgtttgtagtcagtgtattttcagagtggcatttcttcaccacggtgaagaaggctgaaatgaagcacgtgtgctgtggccttagtcctttctggaaagtggtcctttcaaggggatggaggagaagctggctgtaagagtagtcaagggtgcctgagtcgtgcgcttgcgttcccatccaccagctccctctcttttctgcacttcagctgctccacctttgtgtatcacatcttacaaaacagacacctccttcactcaggcctcccttcttgtcacttactgtctctgcttcctaatgcatcctccgggtcccatcagatgtttgcactctttgtctggaaccgcacatgccatttctcttggattcctgtacacaaactataatagcatttcccagattttggtgtctggctttctcagtcagcatggtgacaaaagaagagcctgttcattctgagtgaacttgtcagctgggaacacccaccctcgctggaacacgcactgagttagcatgtgtggtgctgccatttctctctgctcaaagtagcggagcagtcgaggctgttgactagtgacgggcattagggctgacacccgaaacaggaggcagggcagacagaatgtgtaggtaggacctggaggccttgagaaaggtggatccccatctcctattccagcttcagttttccggcttgtcccagccttcctcctggccttcttccctgggcagcacaacgacgtgatagaagtagcagctgagagaggaaaggcgaatgtttctgccttacaagggcattgtgttatttttttaaatgctttgtgtgagcaaatagcataaatagtctataaagtaaagtgactttactttatttactttatttaaagctatttaaagctagcataagcttcctgctgtgtggaaattatggctgtttccatatgttaaataccaagtaagctttgaagatgtgttgtgaaggaaggtgatagcaagtaatttactcttactcactcaggggagctgttaaggaagaaagtcgcaaggttccaaaggactggaagtgaaagtgatattcttaaaatatcttgtttgtttctttttaaaactctgaagctccagggtgccacgggaggggcctgcccagggcttctgcgtgagaactactccatgagccatcagaaacctgactgctcttctcaggtcacgttgggaggatgtgactatttcaccttttgtgagcaaagacctcgcatccttctacgttgggaggtcttctgtgtatgttcttcagactgaagctgcgatcctctcacacttttagacagtgttggttgatgggccagctcttttatggacgtctccagccaccctttccctaatgtaaaaaccacatcttggccaggggaaattattttctgagaggcaaatattctaatatttggtaagaggcaaaagtgacatgtttaaaaaccttgctctgacaagctcttttttgagtgagtgagcagcacctggtcttgaaaggttgagtagggctcccagaaaatagaaaaaggttcctcctccgaggccaagtcagtataaagaatagtttagctttggattctgagtggaggcagggtcagtgagccttcaaagaaggaagcggtgcagaggcacagggcaggaatagaagccagccgattgcagagggtagagccgtgaacgcccagagaggaccgagtgcccctagttactcgtgtgcccagagggtaacttgcagtggcgtgcttcacctccatacttcaaactgactagctgttcacagccaactatagtcagagagatggaccacaaagaaaacaaaaggagaggcgtgaaggtatattctttattcatgtggcagtagaacccaagttgcgtgttctgaatgcacgtggcttttgaatccaggatttcaggtgctttcgtgtgtatgtttggtcgtgtgtataggatgctcatggggaaattacagtggcattctgtttgtgtgatagcacacaggtatgagtgtggagagggcgggagcatatgcgtgtattttgtggatcgaattatggatgctgtgttcttgattagtatatgaccattgtcaaggtggattattaacagtctgtagattcaaaatttgtcaaaaccaccaagctttagataaaaggaaatagaccaggcacagtggctcatgcctgtaaccccagcacttttggaggccgaggcaggaggatcgcttgagtccaggagttaaagaccagccttggcaacatggcaagaccctgtctctatagagaaacttaaagattaacccagcatggtggcacatgcctgttgcctcaactgtttagaaggctgaggtgggaggatcgcttgagcatgggaggtcattactacgctgagccgtggttgtaccactgcgctccagccttggagacagagcaagctctccttttgcttttacattcagagaccaagagcaaacttagctgtaactgtaccatcattgacttttcaactgccgttttcacatttgtctgttaaattcagtgcatcgttgtctaaaaattcatatgatatttgataacttgaatctattaattatttagcgataaagagaactctgagatctgtattaacagagtgagatttctggcaggtgtctgcctgttgcaccttcctcttgacttgtcagctctgtctccccttcccctggagccctcagtaacccacctttgcccagccacaaaatctcttcgtccctgggaaaggcagtggggcagagagagctattttaaaacattaagttttcctaaatcccagtcatgtgccacttaagacaaccatggctgactctggaatttaaattttcctagatgaggcattttcagggtggtggtattatttgatgccctgcctgtacttggaggtagctcagctgaccaacatccttttaccccttttgtgtttatggctgatggctggtagcaggtagcaggctgatggttccctctcatgagtgcagaattcaaaatcatggagtttggagggacttcagagacactgattcactcccagtattttccaggtgaaaaagcctgggcccagagagggaggggacttgcccagcaataagcaggtcattggtggtgctggatctgaccctggctctccagcatcattgtgagcctgtgatgtggtcaagggtgtgggcatggggtggattcgcccaaggcttaggtgcttgcagtggttgcatacaagtttcgagtctagggacccagcagggccctctccttccatttgcctgcagaatcctttatctcactctattccatagtgaatgcacctaggctgaaagcaactactctctttcaagatgaaagtactgagtatccagattttcttctgaatgcttttaccctggaacgggggcagcattgtggctattgtggctaatagcactgtttgcagcagtgtgtttaagatggctttccaccaggagcaccctcaaagccatcctgggaggctccactcagctctgctccagggaacaggatcagattggaacctggatgaatgccaagaagaatcttgtagttatctataagatcatcttctaattcaggctagagaatttcaatgaacgtgaactttgattttaatgccctacctgttactgcttggcattgagttggcagtactgacaaatgatatgaacgtgtagaattggccaatgaacatggctagtgtttgttgagtgtgccaggtgcccttgagaactttatagaaaccaactcagttgattggtttgatcctcacaacagccctgtaagttatggttactgccccattttatagatgaggacactgaggccaagagagataaggaacttgcccttagccacttggctctgtaagtaacaaagccaggatgcaaacctaggagatctgccttttgacctgtgtgatatcagtcatttaagctgcatagggtatggacagactcaggttcagagtccctctaagctccgtggttttccctcttcactctcttgcatgttctctgctgctcctagattgctcatgcccactggtgatcctgtaggctttgtcatactgtttgatttcctatgtttaaactgtcctttctccctgttctctacctctcaaagccttcccatcaccctgtattgtattgaactccacatccaaaaccattttgatttccaagtcagagtccgtctgttccctgtaccccaagtctcacagaatgtaacctctctgtgtcagtgaatttgttctgccttagcttctagtggattgttgacatgatggctcttcccttgtaattgtaaccataaggactgctataccatgttgtatccacatgtcgttgacataatattgctctcaaattatttgttggttggcagggcatggtggcttatacctgtaatcccagcactttgggaggccaaggcaggaggacgtcttgagctcaggagtttgagaccagcctgggcaacataggaagacccccatgtctataaaaaataaaaatattagccaggcatagtggcacacacctgtggtcccagctacttgggaggctgaggtgggaggatcacttgagcccaggaagttgaggctgcagtgagctatgattgtgcccctatactccagcctggacagcagaagaccctgtctctaaattaaataaataaatgttggtttaataaatgaaaaaaggaaggaaaaccagcaatagttttcttaataaattatccatttatttccttatatatatttacaaaccttttggtagaaaatattttcaaaatgtatgtttattactgcctcataagaacagtctagaaaatataatttacttcattcaatgatagtgaattttgagagcctccatagtttactacagatcagatgaattgagtgcttacgtgagtacctacttggtgccaggcaatgttcttggcaccggtgatccaatggtgagcaaattcaagtctctgttctcatgggcttacattctggaagtgatggataataaactagtatgtcaacaaatgaacaggtactttcagaaagtgatatgaggaagatacagcaggacgataggatggggggtgataagggtggctgatggtgggaactctaaaggatgagacctgggatctcacacttggatggcaaagtggaaacagccatgccatccagagtcagctgtccagcagagggacctgcctgtgcatgggccctactgcagtacatataatctgcatccatggcagatgaggacaggatggttgggagtacaaggaaggaagagagagactggttcccaatgaggttaaagttgattcaaggccagattatagttggtcttctaagtcataggaaagaattttcagtttattatgagaggagtaggaacccattgagagtttaaagcagagaatgacataaacagataacatttcaaatagcagtgcatacgtacatacatgtgtgtgcatgcacgcgcacacaaacctgatacagtaaatcactggactggtttatctcttgctataaaagtatttgaaattgtgtttaattgaagggtctaggtatttgaggttttactgaatatatagtatttaaagattaatgaaatagtcacacttatttatccaatttcctgctttggtaggaacttcacaatgaacttcacacaatcaaatgaacactgatttctttaaaaatgaacaaatactccacttgtactcatagcttcatgaactgaacctcagcagaaggttgatcggtgctgcttcctggggtgatctctgtgcaggagatagtctttcaattctcttaggctgatgatgtgagattttaatacaaaaaacaaagtttccctcaaagattaaatcttgtatattcttctgtttactccacccatatgtgtctcgagtcacaggcatatagcaaggcactggtgaccgctggttctccgaagtgaatcagctctgtgagactgaggccacaccctgcagttagaaattttacttggcaatgacagctgtaattttgtcatttgtctgtggctggggctggctcctaaaacccggtgtggatagtgacatctagtggatctctagtagatcagttccgtggactgtcaggtaccaagtgaagaaacacattcagcggtgccacattctaaaattcaaaatatattctctgtaatccagttgcctgtatctaaaacatgaaattattaggaatattaaaatttaatttactgttttttccccacagacagaagatccaaccatggagcgaccctatacatttaaggactttctcctcagaccaagaaggtgaggcttgtgggtatgggtgggtggggatgcctgccctgcatgctgtaggtataggtggggatgcctgccctgcgtgctgtggatatgggtgggtggggatgtctgccttgcttgctgtggtgtgggtgggtggggatgcctgccctgcatgctgtggggatgcctgccctgcgtgctgtgggtataggtggggatgcctgccttgcgtgctgtggatatgggtgggtggggatgcctgccttgcatgctgtgggtgtaggtggggatgcctgccttgcgtgctgtggatatgggtgggtggggaggcctgccttgcatgctgtgggtataggtggggatgcctgccttgcgtgctgtggatatgggtgggtggggatgcctgccctgcgtgccgtgggtgtgggtgggtggggatgcctgccctgcatgctgtgggtatgggtgggtggggatgcctgccctgcgtgccgtgggtgtgggtgggtggggatgcctgccctgcgtgctgtgggtataggtggggatgcctgccctgtgtgctgtgggtatgggtgggtggggatgcctgccctgtgtgctgtgggtatgggtgggtggggatgcctgccctgtgtgctgtgggtatgggtgggtggggatgcctgccctgcgtgctgtggtggttggcttttgctgaagacgattttaagtgtcctttgaagtcacaacccttctaaccaattttcttccattatgtgtgcagtcataagtctcgagttaagggatttttgcgattgaaaatggcctatatgccaaaaaatggaggtcaagatgaagaaaacagtgaccagagggatgacatggaggtacgtggagggcgtcaggcctctctccttgccttgagatcatattcatgttttgctttcaaactttataattgaaggaaataaaagtttagaaagcttaaatataaaaaaaagtacatatgtccgcaaattggtcattgatagtctaccagtgcagttatttgttttggttaaagatgaactttttatgttacaacaccaatcctcggagagatttctctttagacaatgccatgcctattccccaattttagccccacagctctgtgaaagtctcctcacacattgaatcctattattgctatggacttgcaactctttgtaaattctttttagccattgaggtcgcttcaaagtgggtggaggaatttagaaaatcacttttttttcaagtttcttactcatttggccacaggtgacagcctgcagtagaaaaaccctcctctagaaatgccattctgcaacgagctgaccagaggaatgtcccttttttccttcctgacagagccgcctgtatttaccttgtcacagactgatgctgtgggtcctatcgtaccttttcagcacacacctcggccagtgctgttttgttaggcaaattctcatattctcaaagtgtccattaaacgagacctctctagggcttattctcacatctgtttgcagctgttgcatatatgtgatatgtgaataatgtgtgtggagaagttacccgaacactcctccgcctgagagatcatatttccaggcattatttcatttacaagccttcatctctctatatacatgaagaggaataatgtgggtgatagaaatttatgaatgttaacatttcataagcatgtcaacagattttcatctcaaatccaaggaattttttacactcttcttgccttccaaccgcagtaaccagtgaattacttaattttccagtgattttagcagaggatgttaggaagggaatacgtaatgcctaaaatacgtgctgtaaaaatggaactcgaattttggtaccatgaaacccgttggtgtggacacagccagtgtagagggcctgagtagaaggcagcagcttccagactcctggctcctgcggttgtttgggatgcaaagaggaggcttctctctcaaagcccacctccctggggagcaacaggactctgggcctctggtcccctgtgccatgagttctgttagaacacaggtgcagcgcagctcatcttccctgctccctttacctcatagaggtgttgaaaagatggcagctgtactgtgacgcacatcattggcagggctttgtacagccttggaggccctccagtcaaaataacaaacatgacgtatggaaagagtatgatgtgacttaagtagtgtcaccgactgtgcagatccaaattgtgttgtcctgcaatgtagtcatcttagagggcagcacaattaattggccattactcagaagatttttgaggcctttctagaattgatatatatatatttttttggccttcatttgggaatttactcaaatgtggccccgaagccatggctagagccagagagccccagagcaaggagaagggcatgcagggcatgctgtgatgacctcttactcacagccgaagaaccaacctcataatcgtccctttaactttattccgcagcatggatgggaagttgttgactcaaatgactcggcttctcagcaccaagaggaacttcctcctcctcctctgcctcccgggtgggaagaaaaagtggacaatttaggccgaacttactatgtcaaccacaacaaccggaccactcagtggcacagaccaagcctgatgtgagtaccgtgtgatggtcaggaacacgtgcacgtgcactgcacagctagggacaaatatggcggccctttgggacaaggctgggaaataaatcatatgtctataagagcagatggtggtgtggtacgagattcctctccatttacgtaaagcatgcaagagcagtcagaacttgtatattgtaagcgattgcctttgagtcacatgctgctgttttcaatatgagctgatttattttctatgtcttcttttatgtcgattcctgaaatacaaagcagaggttgtttttcttagacttattttacatttgttgattatattgttttcttcttcacctttctctcccaactgacccagaacagaaccggcaagcaaattggctttgcaattttctgttttctctaagtttttggatgtttactctcttcaatgcattgatttggaaacctcaaaaatttttttttctttaaggaaatttgagccccttaatataatcagaaacacatgggagagttgcaaaatcagaattagtaattactgtgtattttaatccctcaccagcctcagggatgcagtaaaccaattcctgttttgttccctcagcaatttgtggtttgattgatagcaaataaacactggttaaaactcatggactttaaaaatggttttgtagcagcttgtttttaaatcattttatacagcaagatctaagtctattgataatacatcgaagggcaaaaagaaagtcttaaggaaaaggaattttatcctagaaattatgagctgcctagcagccaagacaaggaggaaattatcaatgaactatacaactttcagtatgtaataaaagcaagtctactgggtagtataattttcttgtctactcgaactctgaaagaaagtggctaatgatacattttagacaacaagcagtatgaggtatcatgttcttaaaaaccttttatctttagaaattgtaaagatactccacatatgactgtgggtggggagggtggccaagttttctggtctaggttttgtttaatttagagataaagcttgcagaatctggaacaacgaatagcctgtcttctctgagcccccaggtgggttctcgtgaatgtcagctgttcgtgatcagctttagactacccagcacgggcattagctcaggacagcaaaatggtctcaggacagcaaaaatatcagatcagctgggtaatgctgaactatcttttgttaaagttttttcccatggaaatagcttggttgattctttttgttttttatattattgcttactatttccttttgattaatgcccatagctattagaattattgtaatccattgtagctatttgtagtaaaaatgaatttggacccaccttgggcttggttacatgtagtgactagaagaatcttggtagcaatatcctaagcaaagcaccattacctacctttgctcaacagcatgagaaaggagtactgaaaaggtagatcctcatgcgacctctgcagaaaagtggccaggagcaactcacaaaggaaaaaatcctgatagctaatatgtatatggaaaaatattcaacttcataaataaggatcatgcagattagagtttgtattttggggacaaatagggataattgctactttctctgcctcacagagttgtgaaactaacgagggaattcttgagaaaacacttcatacattttaaaatatatactatttttttgatggctccacaggtgtagacatgtccccacactcatcaagaggtgtacgttaaacatgaacagctttttaatgtgttgattagacctcaataaagtgatttaaaagagaaaccatctttggtggcagtgtcccagaaactaaaacaaaaggtataacttgctggctcttcactagtctagagcaacaagggaaaaatgcagttctttttctgttgttgtttgagacagagtctcactctgtcacccacagtggcaccatctcggctcactgcaacctccgcctcccaggttcaagcgattctcctgccttggcctcctgagtagctgggattacaggcgcccgccgccatgcccagctaatgtttgtatttttgtgaagatggggtttcactggcttggtcaagctggtttcaaactcctgacctcaggtgatccgcccacctcagcctcccaaagtgctaggattacaggtatgacccaccacgcccggctgaaaaatgcagttcttaatccaagttcgggctcacatgtagttttgggagaaggcagaggcataactgccccatcaaggaggcagcaatgccaaagggagaggctgagccaggaaggacacagcagaacttggcagaacctgaggagcgcctccttccaatgggcataacttctagaaggcaagaggaaagttagttaaggaaaaagagtttccaccacaacctctgctagcaggccctttattgggatacagtataagttcatttcagaatgtgtgagaaaactttaaaatttgtgttttagaaagagtctataatgagtgttcttgataagtactatatttcagttagtctgaaatgacgatttcaacttttgagatactgacttgtgacataatttttgttaatgggatatgttatcttattgaaagtatctgtgagagttttccctgaaaaaatttttggcatttaaacttgtacactaaaagcctctgactagtatttcccccaaagtatgattgcctataatttactgcaaaaaaaaaagttttcttttttctttttttttttgttttgttttgttttgagatggagtctcactctgctgccctggctagagtacagtgacatgatctctcagctcactgcaacctctgcctcctgggctcaagtgattctcctgcctcagcctcctgagtagctgggactacaggcacgcatcaccacactcggctaatttttgtgtttttagtagaggcggggttttgccatgttggccaggtacgtcttgagctcctgacctcaagtgatccgcccgccttggcctcccaaagtgctgggattacaggcatgagccaccatgcccagcccaaaaaagtcttccaaattgaatcaaaacttttagatcctgaattgagaacatcacatgacaaaaaatagggtatgatgttttggtgttcttcagaccccggctgacttgagaggttatctcctgatgttattaggatttttaaagtagggtaaaggaggtaaatgcagtgtcacgattttgagattctgttaaaatgagctagaaagcagctgaaaaaaattcatgttggatcaggtgtactttcctccagatgacagctttgaatttgtcccttttgtagtctttggtcaaattgctggtgaccagaagtagctgccttgtcattgctggacttctagaaggattgggactgcccagctgctgtgtgaacttgcctgtcacctctgcttccagaggtctgacttgtcactgtggcaaatgggcagaggactttgatttctgttttttattaaacactgaggtatattttgaaatgtatgcctgaaagatgctcaaaatggtgtgactaatgcattttaaaactgcatttatttgattgaaatgaaccttaacctatactttagccgtaatatggtgggagaattctcacattggatgaccagctagttgtcagtgtttgacgctgacactttagtggccatctggccctccgtgagcattgaactgtcatgaagggcccgatctcaaccacttctcttcttctctttccccctttcctgcatgctcagggacgtgtcctcggagtcggacaataacatcagacagatcaaccaggaggcagcacaccggcgcttccgctcccgcaggcacatcagcgaagacttggagcccgagccctcggagggcggggatgtccccgaggtacgatgtccccagaatggtgcaaagcccggcagctccttcttcccatgttctccagcttgattttatatcataatttcttctgtcagtaaacattgttgagaatgtaaagattacagtgacgcagggaattaattaccatctgaatattaatttgaaagtgcctataaaagccgtatttgacaagtataggtggctctatattatagaaatgggaataacattatttttatttttattttttttgaagacagtgtcttgctctgtcgcccaggctagagtgcagtggtgcagtcttggctcactgcaacctccgcctcctgggttcgagcaattctcctgcctcagcctcctgagtagctgggattacaggcacgcatcaccacacccggccagtttttgtatttttagtagaaatggggtttcaccatgttggctaggatggtctcaatctcctgacctcgagatccgcctgctgcctcagcctcctaaagtgctggggttataggtgcatgccatcacaatggctaattttttttttttttttttttcctagtagagacgggtttcaccatgttggccaggctggtcttgaactcttgacctcatgatccacctgccttggcctcccaaagtgcttagattacaggcgtgagccactgtgtccagcccacattatttttcagtatgaaaatcttaagatatttttagtttgtaatttatttttcacaggggtctaaccatgtctcattaaatgacagcttgtttttatcatagttgagctgttgaatgagccctgtaacttgtttgggtatcatatgcatatttttattgagtcgctttgacacttggaagagatttattaccatgaaaatataaatttaggtgaacagaaatgtgtaattttccctttaaatagttatggtatgttacttaaaacgttatgaattaaacaacaaattagccataatcttccatgctatcttaccagctctgtttatgtactaaaaatccattcttcttagacattgtgttaggaagatcatttagaatgcggcgattcaacttggaaaagcaaaagtaatgattccataacacattcactctaagttattttataccattgtttaattacagcgtatagcttctatgctgctcccacggtgaatcctcagtggttaaaagtaaaagaaaatccatgacaattgtttataaactccagagaagtgtgtgtgtgtgtttgtttttttgcccacacatatagtaacaagtgctggaaatcagtcactgttcagagaggcattgttataaagtggttaagagcacagcctctgtctggaaccaggcctctttgattcacatcatggccctaccacttgctagatgttaccttgggcaggttattttctgtgcctcagtttcctcatctgttaattgggggagttatcttcctcgtgattattgtgaaggttgtgtgcctcatgagaggcacttagtaggtgttaattatagttatcaccggggctattgttgttacatggtttcattggggagctgggtggatccctacttctttctagtgtttaccccagtgtctccttctctgaaagccttgggagaccatttcagaggaagtgaatatcgctggagactctctcggtctggctctgcccccaccaccggcctccccaggatctcggaccagccctcaggagctgtcagaggaactaagcagaaggcttcagatcactccagactccaatggggaacagttcagctctttgattgtaagtagtggccttgtttgaaagaaaagctgagcaatgttttattgttttttgttgcttaaggagaatctcttacgtaaatagtgaccaagggtcttccagctcccagctaactctgacattttccaaagttcctccttccctaggagaagcaggactgtactaaaattagcccaagcaggtgagaatctttcttgatttggaaggcagctttgctcacccttataccactaacactttcttggtttataaagaactcaaagaagtaaaactccatgatgtctgtaattattagctttaaccttgtagaattcctttcccagccaaaaggctcatgaaaatagtacctttatcacaaaggtagtatttcacagtaacaattaaaagccatcaggcctaatcagtcctcttaagtcatattctgcaggatttatcattctcatttcgctgataagggcacaatgcttaagtggctcatccaagacaaggtttgagtgggagatagaagacgtctcctaagtcccagagtatgaacccttgagaaatgttgtgaaattgtgacactgtcatcaaggtagcattttaacttgggctctcaaccatcagaaacatactttctagaagcttcagatgggcccaatgcctgagcccaatggaatcagtcacaaagacttccatgtttgacaatacaaaactgtgcagaaataacccatagaaaatccctgcttgtgcatagaattaagagcaaatgaagtctcagtgtttctcaagaaactgaacttaaaaatgtacaatagtaaatgatgatagtcactccactgaaaatggcatcctaaaaaaaaatagtcattactatgaccataacaaacataaatgatagcactgcatacaatgtaaaagcaagtaagtactcacaaaattgttactttttggttatggtgtttttattttaaaagacagtatacgcctctattacatgagttgcatttatcattcagttaatgtgatttcactttgaaattctgtgactttttcaaaaagagatgtgtcgccaagatgaaaatgtagtactaaatggacaggataaaagaaattgcatatatatgggatatttgaactgataaaactgttgttatagaaacaacataaacaatgaagccttgtatttaaaacctataaaagcaaggaggtaccacagaatccatggcagtaacacacctttagtaaaccaagtaaacactgtaatttttttcagcaataatcataagttagcaattctaattatttaaatgaggagctcctgaatttaattattctagatctgtgaaatatcattaagacccaaatacaatgttgtattatttcacatcgtgttcactgttaaatgagagtcaaatcggatatttgctcattgggattaccctgtattcaaggggaagaacatgagctttggctgggcacggtggctaatgcttataatcccagcactttgagaggctgaagcaggcggatcacctgaggtcaggagttcaagaccagcctggccaacatggtgaaaccccgtctctactaaaaatgcaaaacttagccgggtgtggtggggtgcacctgtagttccagttactcaggaggccaaggcccaaaaatttcttgaacccaggaggcagaggttgcagtgagccacgattgcgccactgcactccagcctgagcaacagagtgacacttttattaaagactgattctttcacagtaaccaatgtgggaagatgtgaattgtcccccatccctaccacagagtcttcttgtaccatttacttatcacaaaatattaaaaatgagtaaatactagaaactgatactatggatgaacttgccgataaggagactctggcttctgtgtgtgacctgctgctaatcttcattcatatcaattaggcttcatttaaccacatagactaatacaaacaagttagaggaatattaagacactacacagtagatctttttttttagcttgatctcactatttttaatcattcctgtctttactacttgaagtccacttagaagctaaaattggctgagcatggaggctcacacctgtaatcccagtactttgggaggccgaggtgggtgaatcatctgaggtcaggaggtcgagaccagcctgaccaatatggtgaaaccccatctctactaaaaatacaaaaaattagccaagtgtggtggggggggcttgtagtcccagctactcaggaggctgagacaggagaatcactggaacctgggaggcagaggttgcagtgaactgagatcatgccactgcactccagcctgagcaatagaacaagactctatatttaaaaaaaaaaaaaaaaagcagctaaaattataaataccagatctttcagaagtaggccaagatgatgtctgagctcctctgaatataggatgcaactgactctttttcaattgtagtaatcaataaatgttgggtagccacatatcactatttcttccgtctattcacatcacattaaaatttaccctgagggtgcatcttagagcaaactacaagactgctagcttctttctgtttgtaaagcagcattagagtgttgcagagtcctgttgagtctcctttctgaaagttttggtctcctcttacttttgccactaattctaaggaccaatcaaaattccagtctgcttaactgaaaattaaagtgaaagataactttttcaaggatgactgtccttgctctgaaaagatgtttcatttaattaccttctaatatcgaagagcggtgaatatggttgagtgatatgtttgttaaaccaatgaaagttgcttttaagaatatatttcttgatgcttcctgtcttttcctctccttccagcaaagagaaccctcctcaaggttgaggtcatgcagtgtcaccgacgcagttgcagaacagggccatctaccaccggtaacccatgctaatttccagtcatcagttgactttttgggctttcatttacaatcatctgggctgctgcaaaaagagtttttcctgtgtaaatttatttacaatataaatgagatgtttttaaatttcctggccaattgccctaggaaagtggatttccaatacagagaattgttactgccacccatctctaaaatgctggaacctccattgctttagtttttcacccaaatttataccaattttgatttgctcacttaaacctcttggtacattagttagtaattccttttaccttattgagttactatagttatgctccagtgatctgtactttgaaaacacattgagtccctttaaccaggaagaactcttctgggcgaccgtccacatgttcctttcccttcctaatgacctgaagtctgaactctacagagcctctgtaccttctctttaaaggcagctctgctcaccaggaattggctataattctttccaactctctcatcattttaatagctatcagcaaatgtagaggtgtaggggattttgtaacatctgatgtatgtaaaaagaaatattcaagttggaaggcagactagaactgccctgagagatgtttgatgtacacattaaaaataagaaattttacataaatttgtttcttcttttggaggtgaaaatatgtggttttaatgtgttcaatttgatattttaccttgacagtttttgtctgttgctacaaaaccttgatcatttttaagactaataatgtattacgtatgaatttgaagggggaaaagtgcatttaaggtttttgaaatcacagtgtcttccctctcatgtatgttttttcttgacttcaaaggatattttggcctaggttttaattttttatgtttgagaaaaaattaatgagtatactagtcaaggaagcagtcaaaataatagagtcatttgtgacttacactggagagacttaataataagcttgataagagcgtcttttctgggatggtttcagtacagggctcccaaaaacaaaataatcaactgagatggactggtaggatccttctcaacctcatgatctgtgattttccttgaacgaatggcactttctctccttttcaaaatcaatgtcaattttatttcccaaagaactcactttcctggaaactggtgattcctccctctttctttgtactttctgatgctgtaaactcactgatcaccagtggcctcttgagttttgagtgtggggagatttcagaatctgctaattatttgacaatggcaggcaaaaccagaccagctttccatttttctctaaggcagctcactcttttgaggttgtcattgtttacccaggtcaaggatgagccaccttggggggcataggggtcacgcttcctttgtgctactggtcatcagcgactgctggctttgtctggatagggtgggtttcagggattctgatctcacgtcacctgccttacagcgctgccacagcagtgggccctgattcagacagcagggggtcatcccctaagtgcatttcactgatgtaaattatcattcacagcccagtgccccagctgggagagcgcgttcatcaactgtcacgggtggtgaggaaccaacggtaatgatccactttatcagacatcaatagcaagaggccgtgaggcagttttaatatttcgtgtagtggtgaatatacgctgtttttaaaaataagattagctcctttgtgctacagagctgcacacgtttcttattttaagcttctcatttggggattgtttaaaggtactgggtaaaatagaatgatttttttagtcccacataattttattaggaatactatcaggctttggttaagtgcatttaacttgaccatttagaagatatttttgacttttagtgtttgtactcctgataagtttttccatttcattagaatgcttggttaaagtaatttggttggaagatcatcaaagaagccacaggaattgcatgagactgtgtgtgtgattcctggatgtgcccagggcccttctcttttctgtatctcccctaccacatttttcacagggggttagacttttcttgtccccagaatgcaccatgaccctttctctgccaccaggggctctcctcacacaatgaacaagtttccgtaattccaagggaacataattaggatatataagtgatctagaaaaatttatgtttctctaagccaaccattcttattcattattttaaagaatgtatggtattcctgtctgtgggtgacttagatttgtattttaattgcctgttttctacttgatccctaaagttaggctagcttatagtttatgcttcgcactgcaatagctgtttaaagaatttcctggccgggcacggtggctcacgcctgtaatcccagcaccttgggaggctgaggcaggtggatcatgaggtcaggagatcgagaccatcctggctaacacagtgaaaccccgtctctactaaaagtacaaaaaattagccgggcgtggtggtgagcacctgtagtcccagctactcgggaggctgaggcaggagaatggcgtgaacccgggaggcagaggttgtggtgagctgagatcgcaccactgctctccaccctgggcgacagagcgagactccatctcaaaaaaaaaaaaagaatttccttattgtttcacctgtgttgtattttgctataactgctcattacttgtggataactttacgtatacaattgctgattttctaaagatgttgatgacttcaatttaatgctcagcattgtacagaggaaaatcaaactggcaacagtcagccccagaacactcagctcaggttaagatattgagctacagtggtttacatgagtcatgtgttgagtgaggcagcctccagtagaattcaagaaattctacatgaactattacccaccgtgcacttgtaatttctgtgggagtagtggagctttgagggggacaagatcgttttgtgagataattttagttgaattcagtgctgatgaacatcatctgtatatcacctatttttgtattttgttggccttgcaacctgcgtgtagctttggagtgttgtggtagctgatgtagtaaatgaagtaggaatggaatcattgcagtaccaggctccatggcaagggtcacctggcaggacaaggtgacccctctgaatgagatcccgggtggcacgttagactgccattttcttgccttcttgcctgcactctcccctccccgtcactgagtttcagcatgggttgggtgttttctttccacaggcttggcaatattcattcctaagtgtttcatctactttggtagatgtagatagatctccctacctacttaggtttgaaaggatcacatccatttctcttctgctgtatcctgcatgtttctcttccacatcctttgtcgtgaatgcccttgacttcctgtcttgcaattctgtctcttcaccccgtgtttccctctttggcatcccctctgttcctctgcacatcactcacactgaagtgtattgtcctgggctggagccatcatggtattatatcatctcactgcccctgtgctctcacagacatacggctgtgtacacataggtacacattgtgccactttattttattttttttaaatgggatgtcatgtatacattacttagcaacttggtttttttttaacttatgttcattcttctgggacatgttaataattacataatattcactgacgtaaaggcactacagtgttaatttcccgacattcaaggactttctgctccccctaccctgccctttcaactccatacgctgtgctgaagtaaccgtcctgatatagctttctttctatgatagtgctttcattcctgtagtctaataaacaggccctgattctcagccaagaaaccacagccctttgatttatggcaaataaacgcacagtggtgtcactttctggcagactaagccagggccctccccatgagataaaaggagagggatagcacagtcctttcagtctttgttgtatatattctaaaaatacacgagccaccattactgggttggtgcaagtcttggcaaatctgtgatggtcagtgtcaaagtggttatttttaaaagcatattgaaacttctgcagtttacaatcgtgttctttattttaatgaaagaaacagagccactaggaagttctagctaatggcttttgggcatcacaaagcagtagtgtattcagtctatgatgaaaagctgtgaaatgttaaactaagtcgccatttctaactggtttgattacttttttgttaagctagggtggaacatgctcacaagcacagaacagcagaaggctggttttggcttcctggcgggcccttccatggcctgtctgtagaagctgagtcctgccccctcaactagccgtgcagggtgggaggcagtgtgagttacaaatggaatcatcagcacaagttgttctatgtggtcatttggagagaacactgtaaagaaacatttccaaattgccctctcacataaatgtaactaaattacaggttgccagttcagttctcaatagaagagagaatgagcattttaatcaaattcagcgttctgtactacactcctaattttccacaaactgattagtgctattcactgtggctgtatgaaagtaacctgtatggccaggtgcagtggctcacactggtaatcccagcactttgggaggctgaagcgggtggatcaattgaagtcagcagttcgagaccagcctgaccaacgtggtgaaaccctgcctctactaaaaatacaaaaattagctgggcatggtggcgcttgcgtataatcccagctactcaggaggctaaggcaggagaatcacttgaacatgggaggcggaggttgcagtgagccaagattgtgccactgtactccagcctgggcgacagagcaatactctgtctcaaaaaggaaaaaacaaagtaacctggttgctagaattcatacagctttaggattcagttctgacatgatctatgacacatccatgtgctttcagttgatcagttgcctcccaagtgtcctttccagagattgagtaactgcaaaaatatccttaaggtttccagagctaaggtttccggagctgagttttccaggggcggggccagggggagtggggagttatgggagggaaggggcctgggagagggggaagtggatcaccagaacggctgaaggggagggctctgggcggagggagctgagaatgtaacacattccatttagtatttcattgattgtataaacaatagtaggtcaaaacttgatagcacatactttgccagagatactaattgaccaggaacttaggttacaacttagctcagcaggggagtccattgaagtgcccggatccacgtagctctttgtgttggcatcgctgctagaggaggaggggaggaaggagcttcactcaggctgcatgctaattcatcgatgtttaatattcatgaaaggattaagtcagtgttgatgtttcttctgctcctgctgagtctccacacctggatccagaatgctccatgatccgagtctttgtgtctttataaactatctttagggagctttaggactttatctcgggaaatattaaggaaatggttttccttaatatcagcagaaagttttcttacacataatctaaaatcagctgcttcatgatcttacccaggtgatctttctctgaattgtgcttttaagcctgggaggttaacatactgcttctctgtggatggggttttcaaattacccggcagcatccttgttggtgctttctctaatttgagatcctggagtccaccagggaactccaggtgaccaccttcaccaagacacattgctggtagtgcagggaaaaggtggcataagcacaggaagaagttaggttcagaggaaatttgtatcctcagcctaatagcaagaaaacgacaactgctaaaatatctggaagtaaaagaagcagcttccttttgtaacctcacgtgagaggttattcctaaggcatgggctcctcctatacctttagattcccctaggagccgtggtatagctgtggtcggcttctggtttctgagcttttccccacttagagctctttcacaggcacagatattacatgcatcgcctatgcattcaagccctcctgggacagccctgatctccagcatctgtcccagtgcctccatacatcatcaacacatccttgtttttcagtgtttctccatccacactgcatttcttagactgcttctcagggatcttcttgtgatcaaatgtggactgtctaaatacagtcactctatgcggggcaggtctctaaacccaaaaactgccaagctgtgttcaccttcaaagaaacacactcctatcagcagacttgggtgcacatagcctggggtgtgaggctgggtgctgggagacttcctgagctggggcacacagatgtcctgggtggtcctccagattatatgctactgtgtgaccatcagtatcctagagaaggggctctgtgttgggattttaaaattttgccccagaagctacagtgttagggtcctaagctgatggaggaatgtaggcctaagctagaagagcaccccatgggagctacatcgaggagaaactcagagcatccctctcatacacagtgacactggacagtttgaaatacctttaagctctacctggtttggcagtggaatttagtagctagaacagatgataatgtttttccctttccctgtgatcaccttggcagcaaccctttacgtttgagactacggggtcttagaaccaagttctgtaagaatttggactctgcaactgtatggggttcatttcacagtagatttgaagctgttggaaatctattgctgttttccagacacttgtaagtgttttctatataaatagatctaattaactttgtctagagaaaataattatctgggtgtaccttactttattaaactgatcagaaaacaaatgcaaggtattaaataataatgatttcttgcacaaacagccatcagtggcctatgtacataccacgccgggtctgccttcaggctgggaagaaagaaaagatgctaaggggcgcacatactatgtcaatcataacaatcgaaccacaacttggactcgacctatcatgcaggtacgaagattgccatccaacttaaaaccgcaggccatagaagccgaaatgtacatgaccgaactcctttcctggtgtttatgtattgttctgaaagacccgtatttgtaaaagctttctcacaaagaaaatgcattactttaaatacaataatagcctaaggaagaatttgcttttcaaatcagtttatcactgaatatattttaaaaatgtgacgtgaaagatattttcaaagtaagagcctattgcagtgtgtagcttcttccctgcccagcccccactttaatccgaggctagtttttatgctgggctagtgattcatttttatttcccttgaatgtgtttccccatcctttcccccatcattatgtttaattatttcctccacgctttaaataggccagacctcttattattgctgtttgcgttgttgtttgggttcgcgctcctaatcacacacaccgggagatcctcctatgaagctaacttgtttttgcctccaaaatagcttgcagaagatggtgcgtccggatcagccacaaacagtaacaaccatctaatcgagcctcagatccgccggcctcgtagcctcagctcgccaacagtaactttatctgccccgctggaggtgagacggctacctcatctaactggactcactctgtcctgtgactcccattctttcttctctcttaactctgccttcagtttcgcagccacctcctctctctgatcagtcgttgtgttggtagtgaagggtgttcttgtgcagcctttctacctgcttctctgtctcgcccagttaacattcctggactctctcacctgattctcattctcatttggctaaggccgtggtgacttgtgctggacgtgggcactctcttttcaggacttccaccgttcttgttgtgtttcgcttctttttgcctgttacctcattagaattgcgtaatccctctttcaaataccaagtgctgatattgagtttttaaacatagctattgctttgatcatttgtttttctttcgactgtagggtctttcattctatgggcatacatgtttctgatgcatatttgcatctctgcatcatggctgggcatctgcttgtgctctctgtcgtgtttgtgttgttttggtgccatcctttaacatcacaaatgtcagagttagagaagccaaagagcaaatgtttgaggtcctaagcttgactgtgtcttagagacagctgtgggcttctccacgccctgggtccagatgctgataagtgggaatggatgctgtctcttccacactctgatatgaatgtcatgggtaacaactgtgagattccagatcgttgtatttattgatgtagcttttttcctttttgtgctctaaaacttgccaatctgttcttcattagactgtgagctcattaagagcaagggcacatttttctccactctgtaaaatctccatccataatgcttagtacagaacagtatttttggtacatactgagtagctaccaaaggatggtggttataagtacttaatattgttgtgtgtttatccaacagagaaaatgtaaagttagattgatttaaaagtaaatgaatgacagaaaacaggttttggggatcttccctcttgtccatctccaaagagaagccttctgcaatacccaggtacattttggcacattggaatcgcacatgctaaagagttctaatcctcattgttattctttagggtgccaaggactcacccgtacgtcgggctgtgaaagacaccctttccaacccacagtccccacagccatcaccttacaactcccccaaaccacaacacaaagtcacacagagcttcttgccacccggctgggaaatgaggatagcgccaaacggccggcccttcttcattgatcataacacaaagactacaacctgggtaaggctgctgcttttatttggctccattttcatcatgaagtctggcattaattccttgatttccttagtgtttgtagttcttgcagaggaattggattgactgtaaagggtgtctccagagggtctcctcagcctgcatctggcccctgcataaatgggcgggtgggagtgggtgggcacaggctggtagctgtctttggtattggtgctgggactgccttttctcctgggaagctctagtttagacagttcaccgtgctggatggaaaggtattgctctgtgctgttaagattttgttaattgatcccgtctcacaaagtaatctcactaggagttataatcattttcaaataattttttcttttgtcagtttcttcttgcactttcattggcattacccaccttcttttgatttgtcgctttagtttttaccgttcacatcagatcagtattcacacatctgaggtacattttcatgcccttgatcatggggtaggggatgtactgagtgactttggttgtagatctgatagctcctttttgtgatcattttgtcaaaattgatttttcttaccatgcaactctttcatgtactcctgaattgtacccaagaaagaatctgtacattgtattatcttgagcaaaatgagattaatcaaaggcaaatatgcatatctttgtatttctgtgtcagttctttatttctttagccgaatcggtggctttttcagtgtagtatatgattcttttaaaagtcagttggtattttcctgctatataatctctatacctgtaattacactgaaaccggttcccgtatttctggctatttttgatgctgcagatggtttttcttccggttatgtccccatcgaattgtctagctagagttaactcagagtttaacttggtcctactattatctgtgctacttgctcaaaactgatgttatgggaatgctggttgagttttggtgattgttattggccctagctcttcggtcttggaccaacaataaacatacaccattaattcccatttctagtgatggacattaagtgtgtccatttgatagaccagcagccttatattcaagaacaagccctgctcaaggggatttgggctgtcattttatgccttgcccattgtgtggtatcagttcagtccagcaggtctagagggcgtgctcctagaatcctttgaaccgtgggacattgtgtcttcaagggcattcttggcatttggggcagggacatttgtgccttcagttgcagactatttaacaaacttggcttctgctaccaggtgctaatggtcaccattacccccaccccaacatagtgatgaccagaaatgccctacacatttcaaaacagccctaagtgagaaccactctaagagctctttctattttgaagtaagggaatggcctgccaagagaatttctcatttagatctggtaacattcatttggtaaactgataactgcttctaaggcatataataacatgtaggtttgactcccctactagtctgaagataatgttacagatttgcaagcaagccaagagtaagagacgggcagctcgttggaaaatatagtaatggagttctttttttttatgtctttttacttattaccatggaacccctggctgtcctgccagtgttctcatttactatagcactgctgtaatttcaagtccttagccagaaacaggctccagaaataagggctaacgaatataaaagtagatggattagtgtaaggagccactgtggcttgccaacataagctatgattttagtaattttaactagcttggtaatcaaatcccctaaccttttcacagcctttcaagccacaacaacagtgtaattgcagctgggcagattgtattttaaattaaacagcactcgctttatttattgcttgcaacattgctgaatgaaacccatttttactttccagttgcgcctgtttacccagatacttgttattgactaatttactgatttaaaatcataatctgttagaacaacgttttgttgctgctgctagtgtgggaaatcctcaaggtaacaactggaaattccacaagctactccccttcttaagcgaattcagatgtgctgacacagctgcgctatcgcttctaaacaaaggcctaggcaggattttccctgcggaagacacactctaaattgcctgttcattttgacaaaagatgaagagccggagggaagcatgaagataatttgcaacttaaaaatctgttttgagttggttttagggtttgctttgttttttatttttgaaagaagaagagaacaaatgagagaacagcatagctattcttagatttgagcattagaatagaaaaaggaaaaaaactggtaggacaggttgaaaatgatgaaaataacactccttcccccatcggcctgggcactgttgattcttacaccaaccagaagcctgaaaagtatcaggacatttcccctctatacattgagaaattaaaaaatttattgaaatatgtcatgaaagatgaccttttacacacacacagatactgaaggcagtatgccatcagtatttggataaagtttggcctcattctcttttttttaattattattttttttgtttttgagacggagtctcactcttgcccaggctggagtgtaatggcacaatctcagctcagtgcaacctctgtctcccgggttcatgcgattctcttgcctcagcctcctgagtagctgggattacaggcacatgccaccacaccagctaatttttgttgttttttgttttttgttttttttagcacagacagggtttcaccatgttggctaggctggtctcgaactcctgacctcaagtgatcctgccgcttcggcctcccaaagtgctgggattatgggcatgagacaccctgccaggccaagtttagcttcattcaaagaaagaaagaaagattggctttgttccccgcctgggtcaggcctttcagggaatgcatgctggagaccaggggcttgggagggatgtaccaaggagggatgttccatcctcagcagctcagagcacgtgtatacgggttgagtatccctagtttaaagattcaaaatccaaaatgatccaaagtctgaaaccttgtaagcactgacatgacactcaagcaataaatgcttattggagcatttcagattctcagattagggatgctgaagtggtaagtataactgcaaatattttgaaattcaaagcccctctggtccccaagcattatgggtgagggatgttcaacgcatattagtatatttgtgcctttcacaggatgaagcatgggcttgcttttgtagcaagaaagattacaccctagttaagttgcaggtttgttttccatccaagttcaaactaatgaaacttattactctaggtgtggttgctggtctcttccaggatggaaaagataaagaaaaaaggcacttttttttaatccctgtgttttatatattttgaattaggaaagccctttttaaaaagatactgctctttgcatcctgtttaaaaacactttgaacttgatggagggaagcaattttatattacacatgaaagagttcccgttatgaaactgaagaaaggaagaaacaaccaggcacactttatgcgttggatcatttattttcattgcatcagagccctcgttagtattccactttctcatcagctctgaagttgtccataactaatagagagccttgaccgccacttcatgtgccctggcaactaaggagagatgcctgcctccttgagtggctcggtgggagtcagggcttgagggtgaccactagccttagccctcagagctgattcatggcagctgctgccattatttttattatttttgataaaataatattataagcctcaaggcctctggccctcacagtctatgaagtctaggtttccatgcaaggccactttagcagatctttgaaattcggttgactttatacttcatgctctgcccctcactgcctccctgacacttttctctaatttcagcttcttttcacgctacggccccccccgccccccccccccctttaaatcaccagccttttaccaatagggctgattgtctttcacggtagcctacatgtgattccaaggtcaggctggccttgtgtgtagcattcagaagccctgccctctttcatgtaatagcagtcctcagctttctctaaatctggcatggtcataggctaggtggaagcccaagggtcccccgctggttgtggcgttacctggtccggatcagagttagcattgagtgggtagcttttgagaaattcagtgctttcagtttttcctctgtctgtagttaaccagtcatgaatgtttaccagattatcagcttcttggaccttctcaatcctaaatcagcttagcatatttctttatgttctgtgtatgtcagtgtactgcagaatactggattattttgtgcctctgcttagccttttaaaaaaatatattgggttcagggtcaatatgcatcacaaactgctaacaggatttctttcttcatttaaaagttcacctagctagcaagaagcaagggttgatttttgttgttcgtggtcttttttgattcttgccagttcccaagatctatgattatgattcagtgatactatgacttacacggttgacttgggaagcagaaaaatctagtaatttggcagcagcaaaggccctattataaaattgaatgaagctgatatcaaatgtcttcacagtttactttttttaatcttaagcttatttggttgatagtggttttttttttgagtataaagatatggattctcctttttatgtttttggaggcaagactcactgcatcacccaggctggagtacaatggcacaatcacagtttacggctcactgcagccttgacctcctaggctcaggtgatcctcccacctcagcctttcaggtagctaaggcaggcatgcaccaccacactcagctaactttttgtgttttttgcagagatatggttttgctttgttgcccaggatggtctcgaactcctgggctcaagcagtcctcccgccttggcctcccaaagtgctgagattacaagtgtgagccactgcatctggccttacactgcatttctttttcttttttttctttttttttttttttttttttttgagacggagtctcactctgttgcccagcctggagttcagtggcacaatctcggctcactgcaacctctactttccgggttcaagcaattctcctaactcagcctcccgagtagctgggactacaggcacacaccacacccgggaaatttttgtatttttagtaggaacggagtttcaccatgttggccaggctggtctcaaactcctgacctcctcagcctcccaaagtgctgggattacaggcatgagccatcgtgcccggcctacactgcattttaactgggtctacataagtgagagtcagctcctggactctgggtcataatctttgggcaacttcctgttctctctgaaactccatttcctcatctaaagaaacagaccatgtgcccaacctcctaccaagggtctgttgcaggattttacatctgaccatgcctcataaatcatgcagcctgacccaggttgtcagagtacatatttctcttttgttgattctctgtggtatcttatgaagcttatgctttaagaaaaaaattttgtaaacgtttaaatattaagacataaatgagaacttaatctgcagaacttggtcaagaatctcagtaaagttgtatcataactttgtgagtttgcctgatgaaagcgactctccctggagtagccacgtgacttcacagaccagattgacattctctgctgagttcagaaggagtggaggggagcacaagtgctggaggagggtgtggcagggaggcctattccctaacgtgttaggctggctcccctcaccgggagctcgggacccatggagagatttcgaaaccgttgtccccactccctctttgtgccacattcactggcaccctccattctggtttccctagtaacatcactgctgggactctcttccccttccccttctcaaggtctcagggaaatggttaacctttcatgtaaatattcttactctcctctctccaccaagcacaagaaggaagagtacagtctgtctcgagagacagtcagccaggcttcctgtacaaaacagagatgggacccatctcacgctccaggcatggacagcctggttgccttgaaacaaacagctcaagaagaaaagcacccagtaactgcacacagatacttccacttagcatctactgtcttttacatttttcttgcaggaagatccacgtttgaaatttccagtacatatgcggtcaaagacatctttaaaccccaatgaccttggcccccttcctgtgagtacactggagacacatggaatggtctgaatatgtgtgttcctttatccgctcaatgttgatggagaggccctgtggaccttctctatctccaggctttgtggatctcattggtttgtgtttcttaacagaattgggtgtttagctgaattgtagtcatacattatagttcatgtgatatccagtacttatgaaagaggtttctgaattgctagcttctagcagaagatagaccttgtacacaggatgttcaagagacgttctctgcaggtgacaatttaagtggcactcattcattttgtaacttagcaaccactgagtttcagtcatattgctgattaagtcatcagaacaaaaataatgaaaatagtatgggagaagaaggcctaattaatcatagaaagtttctataagtcatttaacctgcagatttttaaagtttttttctcccttgttggtgacggctcagtaggagttgagctatatacttaaaattggattttgaatgaaaccttcacatacatcctcctcaacaactcactctcagtttgaaaaagccgtagggggtgacagggcagtggttggactccaaggctatttttaaatgggaatttttgttgttgttttccaagtgtaagaacctttttgttgcctggtatattagggcaacattggaggctgcgaaggttaaggttcaatcattattcattaggttatacaggtatcccacaccaaatctgtttggttcctgggttcaaatagaaagaaccagagagttagtttagaaaacaaaagaaagcatttttttctgaatctgttggattcctgaggttcagatagcaaatatggatagttcagataatgagggcataccagctttatcttgaaaaaattctccaaatctgtttagttcctgagcttgactagcaaaagttcatggtggataataccaatattagatcatcaactgcctggacaacacaaatacagttaaccatgtctaacatttttatattaaccccctcttcctttcctttagtactcagtatttatttaattaaatggtactcaacttcaaactccactgttccatggaatgctgcggtttccctttgaagcttttgagctagcagcccatttccggttcttcatacagtcagcgcatctgagacctgagcatgtgataaagcgtgttgctagacatggtcaagagttaacttgaaatgttcatatttagttcacgctcaatgcataaatgtaccctagcagaaaagagtacagaggtgttctatagtttttaaatgttgcctttgatttcagaactcctagctaatgtttatattttctctctcccttccttccccggatactagcctggctgggaagaaagaattcacttggatggccgaacgttttatattgatcatagtaagtaggcgctgttatggacacacaggtgttgtgggttagagggaaggagtaattcaaacatcatagtgaaagctttgtcattttactctttatctaggcagccaggtgttatgtggagaaaatgataccagagaatcagtgccttcatacggtactgtgcattcaccccaagtttgcttaaagtagcccatcaaactttcacccaatctgatcttgtgacctattaacgtgtttttttttgttgttgaatttttaaaccacattttgattgttgatcccttgacttttgcacatttaataaatacactctggtaatagaaaataagattagaaatgatgatttagtcaaaaatctgtgaacagtgcttgaagcagcatgtaagttttttagacactgccttcaagggtcctatggcaggatgcccgctctgaccttattttctattcacggcatgtttccttgcacccacaacactaatatatatgtattttctggaaattgtagtatatttgctatagacatttgctccagcacctatgaaaaaatgtgtggtttctcattccaactaaaagttcaactaataaaagtttgctttttagccagtgggattttttttttctcattctttttggaggtgccatgttcttcatggaatcatatttctatgtcccttaaattttctgaaaaagtatattaaaaagaagccttcaaatagatgtaaagtttcaaccatgagtgcaatttggtagtatcttggtctttgctttcatttggttcatgaacagaaagttagggtttccctggcttcacaatttcataactaaacaaaagcacgttgatgagccacctgctgagaagtctggccacaagtaatcctcacacgtataggactggtcactatctcataggcatagtacgtttttcagatgttactaggaggcagagacattgtgaacagaatttcactttcaggccctgggggttgagggcttattataaatggaattaagcaaaagtaccagcagtttacaattcaactgaaagtagaagtcctaggtgtatttagaagagtgagctaccctttgtttaaaccagatatttcaaggtgcagagacttagtttttgtcttttatcaaaaaatgggcagatttgtcaactgtccagaatttcatagtaagcataaagtatttttcctgctttcatgtatgtgtatgccctacttttttccttaatatactatttatttattgttttaagagaatttactaaaatgagagagaggccacacctctttttcccatgaaaaacaaaataatagtttccggcttggtgcagtggctcacacctgtaatcccagcactttgggaggccgaggtgggaggatcagttgaggtcaggagttcgagattagcctggccaacgtgatgaaaccccgtctctactaaaaatacaagtaaaaactagctgggtgtggtggcgtgcacctgcaatcccagctacccggatggctgaggcaggagaatctcttgaacctgggaggtggaggttgcggtgagacaagatcataccactgcactccagcctgggcaacagagggaggctgtctcaaaaaaaaagaaaaaagtttcctttatagtattttttatacatcacaatcacagttttaagacaggtgtgaataatactgatcattttactaaaacaggtctttactggtaacacatcctggtctgtgacgcatggagagcattgcacacaatattgtgacagttttctggctggagatgtgatgcttaggtccccctaaaaagaatgttgtgaatgtgtttcgtataccgcaaggagccaaaaacagaaaaacacaattacaaagggctgtcgtagcatgcgttaaaatagtgaaaatcactgactatttcacttgtggtgtcatagacctagtatgatacatagcagatgcttgatacttggtgacttgaaatcaggttcatggaggatcagtggtgaagctcttaggaagttgttgtgcttgatcagaaagtgaagtgaactcacttgaggagcagtaggtgcccccactccggctttccacccccaccggcctgaggctagcgcaactccggcttactggaaggtggaagaaggtaactacctgctagatgcctgggcttttccttactcctgatcagttctgcagttactccagcactctgcccaaacatttcctcatttcacttgactagagcagcacccccgaggctccattatactctgtacagagcttgatgcaactaagctgtgccaatatatttgtggccattgacttggagattaaaatttattttgcccttgcacaaccatattgaaagattctgttaaagagatatagcataaattaagtgaccaaaaaccatttaagaaaaggatttgtttacgagtgcctccttagctgttcatgctacgtttctaccatcgctccataattcatcaaggtttactcaatggaaagctgtagagcagtacacgtcagtgaaacagttcaagtcatttgcctttccacaaaattcagtctgtgaaaactgcagaatacctatcttttgaagaggctttatcaggctgacacatacattccaaatgggttgaattacctggaagataacatttaggaatgtcctttctgtcagaagaaagcctctttttctaaacaatcttatagcaaaactcagcatctgattttgctgtcataatgcctacaggacaggaaccaggttatgcccacgtatgccacaatgccgtgagtgccgtcatcttgtaaattgcttagagtcatcttgtcttccagcatacctggcacgtgggtccacctggaattacagatgagatgatgagatgcacttgtcttttcaataattaattatttctgctttgtaagtttttcctgagaagttagacattttcaagatgaacaatactcagccatcataaagatttaatttcaagagcaacgaatgatcgagactaacctctttagactcctcgattcctttgtttgctgtctatggaatggctcctggctcttgggcctcaggtgggaggttaaaggaaggtcttaaactgaatctctacatcttgtaggaatgatgtcattcttcttaaagaccagacaggcccagcagctgagtaattggccacaggtatcctatctacaacattagaagagaaaattgaattccagtgattttgtaaagtcctattttagtctttcctgtcaacagtcttactagacctgttcatcgtgactaaactgagtttctcatccttccacttccttcttgtccttttattggaaatatatctcaaagaggaaaagcaagtttaaaagccaaagttctttaaaaaaaaaaaaaaaggataactggctaccccatactttcatacattgaccatacttcactgaagaattctttatcataaccatgtagaaacttgtgttgttccaaaagcttaggctctttttaaagggactttgttttcaccatcagcttcattcagtcattaaaaaaataatgcactaagttcctgttacctgctgggactggtcttaagtggtagagaggggattgcaaagatgaataacacacagtccctgtccttggggaggttaggtccagtgggaagtagcaggggatatttcaggtgttagaggagtgaatcagttgttacacagaaacagaagaggcaaggactgcatctgcttgggaggtggttgggcacagggatggggccctgagagaatgggtcactttttagatggatgacaaacactgagtaggattgaggcagtcaaagccccaggaagagtgatcctaggatgcgtggaggtgtgtgaatatgtgcagatgctgccacgttccgagaaacgcagcattgctccaaacagctagtgtgccgcaggggcgcacaggccaagccaaagggtatctgcccggtgtggggactcgggctcaagccacaggcagtggggagctcccaggggatttcccagaggggagggatggggtcgaaatcgttatttagagagatccttttggcagagctgtagaagatgtcttgaactggggttggggggtgagacaattcccagtgacgcccagagaacagttcagggaaaaaaaatgagccctctagcaagaagcttatcaggaatagagagggttggtccgggaccaccagagtgagtgacacggccaggttcctgattgggacagtgagtggattgtgatactgcacattggaatgtaaggtcacgttaccaattttggtgttgggtgatcagaggtttggttttggtagagttaagctgaagtacttacgggaaacccagatgcagatgtccaggatggagcttgaagttcaggtctggtctgaggacttgcgaatcccaatgagtcaggagttattcatttattttctgctttgatgacaatatccattgatacggttataatccaagttggtgttttaaggcgcaatttttactcagctgtactccgtttcctttatttggttttcttttctcttgttttccatcacaatagcaacttttactttccaaagtcttctgtgaaaggtaagggacccaaaaatgccttttgcttccatcaagattctctcaaacagttgagatttttcatgtaaattttctgccagcatgaaaacaaaagattctagaatcatcacttgctttggtagcttttttttttttttttagcttttcctctgcttctattaaaataataataagactttttaaaattcctaatatggtcattaaaacagaattcactaattattcttatcagctcacttacagtgtatacagaaaataaacagaatcaatattcttcccctgcactcccccgccccggtccccaagacaggtgcagatcgggctggagcatagtggcacagtcatagctcactgcagccttcccctgggctcaagcgatcttcccacctcagcctcccaagtagctaggactacaggcgtacaccaccacacctggctaatttttttttttaaccttttgtagagatgggtcctcactatgtttcccaggttgggcccgaactcctggcttcaagtgatcctcctgcctcagccccccaaagtattgggattacaggcatgagccactgctcctggccaccctttacttttcaaataattttcttcttctttttttttttttttgttttttactaacctagatatccaaaaactctggagaacctactctccctagtgtgccccaccccccgtacctttcatgtgagtccattgcactctctctccctccactccaccctagtacacacacaggaatccgtaaggtctttttaattatgcacagttacaaacaccaagtgatctaaggcagctgttgtgtattatcacctacacaagtaatggtatagatagcattgaacagtcttgtgcacattaactcacttggaagaaagcaaaccaccttttgccagtgtgaccaaacagaaaccatgctctgtaatcttcctctgctgtatctaattctcttttttggactgcctaagctgctttgatttttgtgtgcatatgagtgacgcatgtaatagattattcatttgttcaatgcaggattcttaattgaaagcagtttttcaacaccataagtaaagagaaaagtatttgaaatgagaaaaaaaatcgtgtgtgtgtttgttagccttttgggaaactaagactttttaaatgctttttttcaactaaatgaaaatcaagatcaagttataaatccttaaaagaacaggggtttataattcccattttagcaagttatttgcccaaaacagtatgaatagatggtttatctttagttgtgcatttttgattgagtgtttttaactaaacagtatgtgaggggggttgccatatagactgtagttacctgctaactctgaaatactaatttgtctttagaacacagggtgggggactggacagcttttgaagaatccagaaatacttccttccaaaactttctttacatagaatagatttgaactaatgttctgattttttttttttttttttaacattttcagatagcaaaattactcagtgggaagacccaagactgcagaacccagctattactggtccggtcagtattttcaaattctgcctcttcagtataagattttggttacgtgtttacgtgtttcttgtgtattactgataacggtgatgtcaagggacaacggtgattgagtagttgactagaaacagagcactttgctgccatctccttactgaagtttccaggtgaggtacagctgcatgtgccttttcagatggatttcattataaaggaaaacagcttgataacgacagcagaattaaacatttttcttctcctttataaaagggtggactataagtatagtcaaaattccctcccttcctttttatatgaagcaaaaccaagccctatcttcataaagtgttatcatttctttaggccaggagtagtaaatgtatgccaaaagtttaaatcttttacaactttcaaaaatctgtagaagtttgggtgagattatagctaagttcaggagctggcagagttaagagtttggaactctgccgacccacagtgttctcatggtcccctcatatatgccgggtggaaaaagaatcaattctgatgcaggcgtgatgacctcttaaaacaccgtagcacactgtgttcataaggcagtgtgagaaccccactccctgaagcatcaggagacatttggtatctcacacttgttaacaagtctgtagaatgggaccacactcatcagcagagagcacaccaccagcttttgtcagtggctatacgagtgcagggaggtaatttggaattacaggagttgtactgcgatcagcagaagattgcaaatttgggattcttagaccagaggagcaaaaggaactgaagtttgttatatcacatgctgagctaagaggccagtaggtagatttaaaattccaatttcatggctttaatctgattccattcaaattatgttttgaattagtaagatacatccatttgaaaacttaaaagatactacattgcaaatgtgccccggtaactgactcctgttagttacttgttggatttgtttagtcatttgggtactatttcctaggcaaagtgcccagtagtacctgggtaaaaacagtcaacttttttctctatgcggcttaaacactgccttactctgatgcttccttttgatatatatatattcgcagtcacagttgtttattggaatattattttctcttctacatcattagaacaaggtaaattcaagaaactattctttttaagtgacagaagacttttgacataactttgaagccttttcaaaatatttttatcacttatcaattaccggccgtcactcaaacactgctagtccttattaaatcttactgaaaattgctcagcatcataaagccaagtagatttgcccccaagaaagagctctctgctttctgttaataaaagacccttgtttattccttcatttttattattattattcattatattgctttcaatagaggagaatctgtatttaggtagttatcaacttagtgtagacatttggcctttgttgtcattcagttctaaatatttggcaattttcatttgatttttcttcttgacttatacattatttaaaatatgctttttagtttctaagagtatgggagggttgtgcctattcatttttttttattgatttctaattttattgcattatggtcagataatattgtctagagaatatttattattggatgtttatttaaaacttcattggaagcttgatcactttttgtaaatgttctttttctttttaaaaagaatgtgtattgtgtctttggttgaatatagagttctttttgtgtccattaggtcaagcctgtggtgttcaaattatctacattctcattgctattttgctattggatctaatcaagatagttctgtcagtctctgtggtgactgttgccctgtcgatgttgtctgaggtgtatataactacattctctttctctgttcgtatttgctgtttagcatatcttttctctctcgcgatattttatcttctttcttgccttttgttcaattgatagagtactctctattttattttctctatgtgcttgcaggctgtactttctatttgtattcttatagctctcacattaaactgtgtaacccacatacttgacttagggttaaaatgaatcactgtctactctccttaacatcaggacctcagggaacttgaatgccattcttcccactcccatttgccacgtcattgttgggtggaattttaaaactaccttgctttaaactttcctaatagtcaaatagtcattaatatgttttatcttttttctccctactgtccatactgatttaattttaccaaatgtagacaaatttctttgcccaccattggtttgcccaccattggttcttccatccattttttttctggggtgagttttgatcttagtgaagcctagtccagtttatggttcttactgtgtggtctgctgaccagagtatcagtatcgcctgagagcttgttggaaatgcaagttttcaggtcctaccccagacctactgaatcagcacctctgggggtgggacaccagtctttgttttaactgctctcccagggattccagtgccccctcaggtttgagcacttctgcccagcagcactgccagtgacagtctgagagtggtaatatctcttagtctttgactcaaaaggtctcatttgacctctctgaagttcagctgatgatagaaatcttggttaaattattttccctcagtgctttggagattctcctgcatgtcttctggcctccataaatgatgataacaggtttgctgtcaatctcattgtcgtttctgtgtaggtaaatggctctgttctctagtgattttgaatttttatttgtgtcttagatgttttacaatttcgctatcatcatgtacctatgtgtggagttctcttcatttatcttgctttggactcaggcttcttcagtatggggattgtgtctttcctctgttctggaaaattctcagctattatttcttaacatactgcatttttccgattctctctaagtatctgtttctgtaactcctattggacatttacttctctttcacattgtctgctttatctcttaacttttgtgttttctgtctctcactgctgtattgtgagttattacttagctcttccagttaattctttaagctttttttgtaatctctttatcagttcattgtgtttattatttcagtgactaaatttaattgctcaaagttttatttggtcgtttaaaatttgcttttgtcttcatagttattttgtcctgttctctttatctctttatttatttttgatgctttcatctgcttattatttttaagatatttatttcttagcctctttgagattattctattatctctggtcctaggatcattaaatctcccactacgtctgtagactctccttaagagtgtagattattgcctagttcagtttataatttgtgtgtgtgtgtgtgtgtgtgtgtgtgtgtacatgcatgcaagagggagagagagagcatgagcaagctcatttttttttcctatgaggcttttgtaagtcctgacctgtatttactgttaacttcttagcttgggttcatgcacccccagtcagtataactgtggacctcatacccactttggcacaggcttggagtatggatttattacaggtctgtttctttttgtttttctcccatttatggtcctggacagaaggtaagcttccttgcaacttccctggtccggtgggtagagttttcttgtcccctttccagatgttaggttttaaacaatgactgttctttctccatcatgtagaccaaaggccaagttctgtgtccccatgggagattaaaacccaagcccctatgtctaggtccagtgcccactgatttctctaattgtgagtctttctgcttacctagtacctagagtttctcttcccaagttttaaaaatatcagttctaagtaggcctagcgtttctacatatttttagggagaggggaccctttctgtggcagctcagtgttcagcattcctgtaagttagcatgctctgtgtatagcagatatcactagtaatagcatttagtaagtgatgttcacacatgctgctgtcatgaacactatctcatgttgtgtaacactttcatttttccaagaactttataatcagccgacttgaaactcacagtcgtcccctcagaaaggcagggcaaatgttgttatttccaatttgtcagaagctcagaaagcttattctgttgctgacagtccttgcaagggtcagaatcaggaccggagccccagatgcgctggtgtcactgatgtccccgtgccgggcatgagcccttctgtgcaaggagctccaatgtctcccggccagtgatgatgtgaaaacatttagaaccgacctacacaataaggcagattttcattctgtacccaaaacaggaacacagatttaatgcagagcaaaagggctttaatcaacagatatgttcatttttcacgtagacctattttacaagctaacttgtaagccagaaaatgacattcgagattttcaagtgagaacaaatgatttggtccaataattaaaaaaaaaaaaatgtacgtgtaatctcttcagaagctgcactggaaggatgtttgtcctggtacgttgttggaaagttttcaggaagagaatgtaaaaacttgctcttcttattctatcatgagaactacctctggagagaaaagataatgaatgcaagaggaagacagtgatttttcagctttcacgcatcattccccagaaggagaaaggcttgaaatatctcaacatttccgcccacacctcctcagcccctgccaggagacagagcaggcaagggaacgggcatcataggctgggggccacatgttgaaatctgctccttggggaatttgtcatttaagacagtcgaacttgcatacacagtgatgactgtttaagctttttttccaacattttcaggagtagggggaactgtgatgtaacagtgatgtttggagaaccctcacgaatacaggaacaaacaaaaaatagttgctgggaatcacagactttcagaaatagaagagctgagtcacgtttgttcatccagtcaaattcttccacttaacagtgaagaaactccttagtagagaggatgtgatgcagagccagctgatgagagtctacccgagagtgcaggccttctaacgctggcaggagagagtggaaggaagtcacttttttagttcctatggggtcatttttttcctcatggcactaccacggtttattcattgatttcctattgcctgttgctctcaacagcttgtgagctccaggagggaactgggaaagctacctttggtttatgtactgttatttttctggcacctaaaatgccttgcacagagtaggtgctcaagaagtatcggttgaatggacgagaatgaacaccagaaagtgagaaataaactagagaggaaatcttagtttgtgacgggatgtactgttggtagagcagaaaacatgatctctttattggcttatgtcagaacattgtattctttttcttattttggtggttgtccaggtattaacaaatttataccttgcctagactcagaattgctatgtggtttcatcagactaaacactgcctaaaataaataggatgtgaggtcaaatctgttgttcagtggaaaatcaaagaagactggcttaaaaactaagaaaagaccataggcagtgtaaattgtctatagattgctcctaagctatataaagatgatgtattttttgctctggaattacagagcaaaacactgacgtgctcattttctggaagagtggttgtttgttttgtttcgggttttttatataaacatgtcttaaaactataaaagagggaagttcatgttcttcatttcttctgtttctggtcaagataagtatggtgaaagtgtaaggtttggagtctggagatactagactaaggatcagtatattttattaacttaggccgaaatgataacagcagaagtattctctgctgaaattcatactagtggctaaaaagcaatgagttgttttcgaggctgtcatagttaatgtctgtgtatatgcaaaacccaatcctttttgctcataaaaatatcgtaagctttttcagtagccaaaactcacggccctgactctaagatattgtaagctactttacaaggtagcaaataaagattatttaaatgactacattaacatgttactcctttgcctgaagagatatcacaacttttgaatgactatagttaactcaattcctgagccctcaactggggtactatcactctatttcatagataaagcatttgagatttaaagaaatccttgcccaagaccactaaatattaagggacaaaccttctgacttctaaattgaggattttttgagaatgccatctgcctgattttatattccttgataggagtgtcagttcacttccctttctgctcgttgtatttccccacaaaaattcgttaaaccgtaattagacttttcaaaatgccaacgtaggtcattctgggttgtatgttagaagtatttagccaataactcttacctaaaccacagcaaaaaagaaaaacagaaacaccctgactcatattctgacaaaagtcacttggaaagcatgtttagtttgtgtagcgtaccccaaatggtttctcaaatagcagtatagctgttttcaggggtgaaagctgcattcaaagctgattagccctcatcagttctaggactttcccctgtgctgtgtagacattatctaatttttccatggataatctgagaagtgagaatttacggtttatgactcatgaaattctcttgaatgttgcctcagtatacataaaatttcaggtgtattgtttgcattatctatatttataaatttatcttccaggctgtcccttactccagagaatttaagcagaaatatgactacttcaggaagaaattaaagaaacctgtgagtaatcatgccttccaaaaatgctttgtgttagtcatttgtaagttaccacagtcacttcagtgagaacaacttggttgttacttttatatgaatgctaaaaatattaccttccttttctctctgcactttgatcctcctggttctaaaatctgaattttctttttaacagaaatggtaagtgaaaattaactcagtgttacatatcaaatcacctgaagggtaatttcctatgtaatacataaaaagacaggaatgatttttatgggatataaaataattcagaaccctagtcacaaaatctgtggaagcctattcaattatgcgcagttatcatatttaattaacctggatcccggtaagaaaaatgttcaagtccttccttgtaaatgcaaaagcttagtttcaactacagtatttataatatagtgttatatttaattataataattggcagtattacgtccaaatgtaattttctacttataattatccctggcagtttaaaacctagaaactctaaaaatttttatgggcaacattttaaattataacattgcattttctaatgacacaccatccccaaattgttcaacattgcatcctctgttttactttccgattcctccttagcagttttctcttcaattttctccatcactatggttacacctctagggaggggagagaagcggctgcagctcagaccccctctggtggcctgggctccattgccatctctccctgcctcctcccctcagctggttcctcctgcccgggaacatctctggatggggcacaatgtctgctctcatttaggggttttggtctctgttccaaagtcctgattcaagagcttgcgggtaactgctattgaaatgattctttgccttcaaaactcaaatgatcactgaaaattccacagttttctttgtgagtcatgtcccctggtaatgatgatgactgtggtcatcacccagtctcactctatggctctcacatagcagtgtctgctacccggaaaccatctctgcacattcattcttacagccagaccaagcctggaccgcctctttgcaggaggcagttgccacaaccttggtcaagtgttttgttattttcatgtcagcgaaccatgctttgggctgctttccccacacttggcataatcaggatcccactccccatggcaacaaaatggacttgaggcagcgtggattatatctaccacctggcggccctgccacagttgagcatggataggcccaacctggccaggtggggattattacaggttttgactacctgggctaaagtctcttgagtgaagcaacagatacagtcgactgcctttcggttgccctatgctggagaagtgcccacagttgtttattaaagggggcaaggaggatgttctccttcgcagcagagttctaactttcctgagcatcgctagtggatgccgtgtgtcccatcgtgacacagcaaggctttctgtctgcaagggaaaacccctaaaggagagaatctcagttggaaccatttgtcactgcctgtttctttgaggactgccaacttttctaccatttgctgttgtttttattagaaaacaaagtgtgtatttactgtatgattatgtgttttcttttgtcttttgtgtaggctgatatccccaataggtttgaaatgaaacttcacagaaataacatatttgaagagtcctatcggagaattatgtccgtgaaaagaccagatgtcctaaaagctagactgtggattgagtttgaatcagagaaaggtcttgactatgggggtgtggccagagaatggttcttcttactgtccaaagagatgttcaacccctactacggcctctttgagtactctgccacgtaagtatatggccacacccagtgtgtgtcccccactgagacagttgtatgaatttaaacagaatgaaaggataagcagctcatgagttcgagatgcattaactctgctgagtttgttctctcctcaccccacagccccttgcaagtctagaacaggttctgactctacgtggtgaaatagtgtactctgcgaacatctaacattgattttttttcttgtctattgggttcatggagttgaaattgaaaacgtggataattatgataaggaacaggaggcgattttcatttgcagtgttcaagaggaggacttgtcagtgttagaattcaaaaacaaaggaggtgttttttgaacaagagtcgtttctgaggtctcctgtgtaaaggcaaattgtaaggactttgaggacctaggaccatgccctgctcctgtaaggaaagaaccaggtttccccttgcattaggatttcatcattgccaggcttggaaactgaggcagactaaattgctttctgagcaattaaacatcagctacttccaggccagccattcctccttcagactctgaatcctccaagggttgggcagtacccaagcccccagtagaatagtcattgaccttgctgaagggcatttgtcatcactccagccctgggctctaaggggacgtgggttcccccacatctcccacctggtaccagtctcctgggggctcatttggaaggccgcctcagtacattcttcctggttgctctagccaagaattgcccaattgatttgttgttactgagtcccatgagaaagcccactatgtacaatgtatccaactattgaaggtggagggcagggtggagagagacaagatctttacctcttctccacattttcaaagatacccccaccccggaggaatcagtctgtgatcccagtttgaaaactactgatccacatgattgtgaaccaagcaagatcatttggacaaatctaaaaatttgcaggtttgcatcattgagagagccatatcctgttcctaatcccctcgaggccttttcagagcagagtagtggtcagaagacagaccaagggttgggcccatagcaaacatcttatggccaagccaaaagcctctggaaggaattaaacttccttcatcacagagacgacctaaagtactcacatctttgggaatccctgcacagcccctttattatgtggcgtttctcatctccccaagatatttggctgaaccatatgaaatagacacttcgtaggtcaaaaacagtcaaacatcagcgtctcttatggtttaattgactttagagggcacatgcgtcagcctccatggtgggtcacggttgagcatgtggtaagtcaggtcctctagcccacacattttcccactaggtacagaatgctcgcagggacactgtaaaagttgagtgacaggtggcaaacaaatatgcaaaatcttgcatttgaaagtgtgattgggcttttcttctctttctcctcaaaagggacaactacacccttcagatcaaccctaattcaggcctctgtaatgaggatcatttgtcctacttcacttttattggaagagttgctggtctggccgtatttcatgggaagctcttagatggtaagtcttgaagtaataaaaataggtcagtgctgcttgcggtttgctagtaggtgtcttatctttcgcatcatgggtttttaagcaaaagcttcactggtttactcataaagtatttttatgttttgcccataatggatgtccttttctctggtagcttattttgggcactgaagacatagtgtctacacacagttaaaaacaaaagtttttttttaacttcagtgtaaaacacagaacattatgtatttatacatttgtatgttttctggaataactttagtgaaagcaagatttgataacagatggaaaaactaattgaaaagttaattaaaatgatctcatctatctaatatcctgtgattattgcgtttgtccccaaattattttttaatttgaagggactaaataatttcaaaataatgttactgcttagctaagacattaaccctgaaacaaataacacaaaataatttcattcttatttaaagcatatagatcatggaagaatttcaaggtaccttgaaagttagaagtcaaaccctctacctggcggtatctataggcttagagacttctaaaagatttggccaattcaaaatagtgtccttaagaaaacactacagaaatcatcagtgagaaaaaagcatcagaaatactttttaagagcctggaggtagagtggttgaggatgggaagagggagagtaggatttgagattgacattgcagtaacttataagaaagatatttccaagggaactgtgttcattgcatttatagagccttagctattctaataaataatttgtataccctctgtacttttcccatgaatatgtttttactgttaattggtagctgatattgatgctctgattttgttgctttatttggtagcagggcgacagtaaacactttttttcctctagaaggaaactaaaccacacactctttccatgtatgtatagtgtgaatatattttaatttccagctttggagtcatgccatagattgtttcagcctgctccaattcactccaactttctcagaaggtcagtttagtcaccgtatgcaagtgagaagatgctgttagttgctacagtgtctttaataccctctctaacagggggtaatagagaagcataagatatgatcctgaccttagtcagcttatattttagcggggggaaaagagatgagaacaaaaccagaagaatcacagtgatagtgtctgagcagaagggagtgcattgagtcctcagaggagaaagtgacttggctggaggctcagggaatctttcccaggatgagctgcacctcggaggtggggtagcatttgagcgttcaaaggctggggtcatttcagatgagtgaggaccagcccagagtcaaggccttgtggaagaagatgggcggaagcaggaaccactcagggtctcaaggagctggctaaagtgaccccgacaagagtgatcacgatataaacctggaattgcacatttaagagtccaagtgcacatagatgggcctagtcagcagtgtcttcaaatttcccacagatgggaatgtccctgtcggcagggctcattctgcacatctgtccgatgggaatgtccctgtcggcagggctcattctgcacatctgtccgctgctccccctggtcggcttcatgcttttacttccccagacactggagtctattggagcctgcatagggccacgctgagccggggagaattggcctgtactgcagagggtgggtgcctggtggggggatgaaggagcagaagcaggagcctggggtgccaggtctggtggggtcaggaccccctgtgaggaggtgcgtgatgcctttggatcaggtgaaatggaggcacctgcaggacgcctgaatggtgggaggccgacctcgctgctgttgcctccctgaggcctctgccgtccctccgcggggggttgcacaggccctctccggggccttccccatttccagcctgtccccttcctgtgctttctccccatcgctgcccaagcaatgataacagaagacagatggaatttcacctggcctttcactgactccccactgccctcagagagcaccccaactctccagcaccccatgtgggctctgcactgccggccccttctctggcctgtctacccgccctggcaaacggctggcaagtccccagccttgttcctctgcttagtgtgcccttttctcccccaattcctacgcctgatttgcactgcggactctgcttgaccttgaagctcatctgtcacctcccagaggcctttctggccccactctgctgcgccatctctcttagcacagctgccctcctcatgccactctccccctgatctcgcctcctcgcttgtgcaatactgtagaaggcccttggttactccttcatggtttctcatttacattgaaagcaggttaatcttttctttcatgctctgatacatagcagtgtcaaagacctgaaactaaacccagtgtttaccgtgttttaggtttcttcattagaccattttacaagatgatgttgggaaagcagataaccctgaatgacatggaatctgtggtaagtaaatgcacgtcacacactggccatcaccgggcactcgtgtcttatgagaaggtattggagagccatatttgtagtctcagccacttttatgggtgttgcattccatgtgaacaacaggagacatttaattgcttgaaaagttcattgatctaattcttgtaataaatcattgttcacatttcctggaaccatggtacctagggtggatacatccaaatcccagttgcctctgcttacccggcataggacttgtgtgaacttactaaatccaagagacagctgaagatctatggtagcctgtgttttctataaaaactgctgctgctgaatgtttagagcttcatccgctctccctctgtttcctgacatcataaaaatggcagaggcaaaggtcaaaacaataggaagagtatcaggcagacgtcctagacatggatgagtgacgccacagctcaggcaagtgaacacttgagacgttctccaagtagtgatttgggttttcatgttgcatttaacattaattttacctagacagaccattttagagttggaaggattttattttttttttattttttttattttttgagatgatgtcttgctctttcacccaggctagagtgcagtggcgcgatcttggctcacttccgccttgcggattctagcaattcccctgcctcagcctctcagatagctgggattacaggcacacgccaccatgcctggctaattttttttttttttttttttttttgtattttagtagaaacgaggtttcgctatgttggccaggatggtctcgatctcctgacctcatgatcctcttgcctcatcctcccaaagtgctgggattacaggtgtgagccaccgcacccagcacggatttgctataaaacaaaaattgatgttctttttataatatacttctgcttctgtttttcttttaatgtacctataccccacatctacctccagagtgtatgggtgtttgcccacacgccagcacacacacagggccactgggaagcgcgtttgtccatttggggtatttgcagctcattcgtgtttgctcacttgagttaaaaagcccctgcatgatgtcacctgcctgtgataccaactgtattttgggcacggttgggtagatgagctgtgtcctcggccctgaccagcgctgactcagtgtttctgttgctcctcattgtatgaaaggagaggaagaggccagcagtgcccttgaacccactgctggtttgccagtcatggtgggttgggatgcacacctgtgattccggtctccactttgaccctgtgtttgtgctttctgctttcatcactgtatgatgaagcagctaggagcacaggaatttctcttaacgtctaactttataccacatgctgacagttagtgcctaaagtacagtgcgtgtattatttttaccctcttcacagcccgtcgtgtccccagcaggagagaccgtggagggaccagggacaggcgcttaggcctgtgactgatcctctggattctgaaaccagagcagccaccctttttgctgacattaacctggagagtgatcaaagcacaagaaaggggataacttaaaactattggtatttacttagttggaacattattttacttatttatttttttggcgatagaatcttattctgtttgccaggctggagtacagtggcacaaccatagttcactgcagcctctatcccctggcacaagtgatcctcctgtctcagcctcccaagtagctaggaccacaggcacacaccaccatgcctagctaatttctttttttttttttgtagtcatggcgtcttgctatgctgcttaggctggtcttgaacagcctcaagccctcctcctgcctcagcctcccaaagccgaggattacaggattataggcatgagccagcaagcccagtctagaacattctttatccttcctgttttcctcagatactttcactctttttttaaactttatttattttttatagagacagggtctcactatgttgcccaggctggtctctaactcctgggctcaagtgatcctcccaccttggcctcccaaagtgctggaattacagcgatgatattttcactctaaaaagatagaaagtatattgaccagcctggccaacatggcgaaaccccgtctctactaaaaatacaaaagtcagccaggtgtgatgtcacacgcccgtaatcctagctactcaggaggctgaggcgggagagtcactagaacccgggaggcaaagattgcagtgagccaaggtcatgccattgcactccagcctgggtgacaagagcgaaactccatctcaaaaacaaaaaaaaaaaaaaaaagagagagagaaaagaaagtatacttatgtctgtatgttaaattttgtagaccagtatggcagctccatccaccatccagagtaggtgccttccactgtgcatcactaaggacaggatttaactgcaagctcattacaactaaagcagtttgtttgtttatagtttaaagaggaaggtttggtttaggtggagcaggaaacattgcattagtaacatatttcttgagcattctgcacagaattacattagaatgtaattaaagaagtcaaatgagtttgtattttggggaaaaaatgctgaattttcactcctgtgtcattctgtaggatagtgaatattacaactctttgaaatggatcctggagaatgaccctactgagctggacctcatgttctgcatagacgaagaaaactttggacaggtacatgtgggtaaccctgggaactcttctttagctttcaaggggcatttttcttcttgacgggctgtaacacaactttgctggaccatcagaaacaaccagcaggagctgcaggtgttaattttcatctcattgtagcagcaccttcttgtcatgccaagacgccacactccaattacaaccatttctctcttccagcaaagttacagaaattccaagaggccttggggcatgaaccagcacctcttctaatccaaagcaaatgtgaatgtttcatttgtgcctcggttttagaatttaggtacttgaaaaaatagtgagattgttgacttagcgatgtaaatacatgaccaggagtgggtgatgttggaagggccattggtttttctctctgttttatggttctgttgtcatggcgacatttgtcttgtgaggctcagcatggcaggctccggtttttctaccattccctctgctttgcccccacgctgttattcaggctggactaatcctcaaagtcagtttcagactggtcagcagggatttggatgggccactgaaagtggatttcaaaggtaaagttgcctgcttggaataattctcatcatgctaaggatctatgcgatgtatttgtctcaattctgaagcctttgcttcatctgccactcagtaataatgatgcagcttgggaggtgttctcaatgtattctctgaccctggtacctgtccttccgcaaaagcccagaggtatttcccatccttcagactaaatctccacggctatgaaattaattagaccatagaactcattgtaatggttgccctctgaaaaatgaaatagacgtgttctttattgctagatgtcaaagattgctagagaatctttgagaaaagaagctgatgccactagaggatttaatgacaactgagggtaaaaattgttggataagaaaataatcacattaatatcagaatcacttgttattcccatgtcctgtgtttgagccaggagagttcagtctctagtgtgagtcctggtgtgggtggaacctggggagtccatagggcccttcagtggctaggcaaggctcagagaaggacttcaggcaccagaggcaagagaccttgtggcttaatgtaaatgatcaagtcctttaaaaatctccttttgtgccccctccccactgcccccctttcccggcctcctccccaccccactgtgttgtgctttatgcctgagaatccttacagacaggcggacactgttctcctgcacggggaccttgtgatggggcagggaggggtcttttcagctgctgcccctctggtctccagcagcctccccaggaccgagagtactggtgtctccagccctgtctacctccttcctctgctgcctttgacacaaatagctcactccccccagagacacctgcaaggcacagtgcctttcactccgggctctcacccctccccactggtctccagtcccctggaagtgcatgctcctctgctggccctgtggatgcaggtgtcaccctgccagctgtcctgcacccgctgcttttttgtctcacccttgctatctggatttcctcatcctacctgtggctccggctgcacccatctccgctcaccaccagcctcttatctcaggccggcgtctgccttccagcctccagaattcccaggtctaacggcctcctcaactgcttctcctgagaggctcacgggtcccagtgctaaagccactttttcctccccagcccccacatcggttatggtctcatcagtgccaccactgtcccctcccacctgacacttgggcatcccctcagaatctccctctctcctcatgccatctcccctcctcatgccatctccccgtgcccaggcttgctgtgccccgtgactccccgtccttggcacgtccctgtctgtgcactcccctagccctgctccgatcacttcttgactgctgttctcacagcctcctgtcggccgccccctttcctgctttgctgttctccagtgccctgttctctagtgcctaccctgttctccagtgccctgttctccagtgcccgcctagctgtgagccccttatggactatttctgaaatgcagccctgaaaatgtccttcttctacttggccatcttgtgaccttcagcataaatgaaaactgttagcatggcatatgacccctcataatccagacctacccccctctggcattaccctctgacacctccttcctgtcaacctgtcaacaaacagtgtgccttcaagggtttccccagagatgcttcagtgccacattgctggctcgacactgcccactctgtaccgatgcattctcattctctctcccatcacctctttccctgccatcctcgaggtattgactgacgtgctgtgtgctgtatgccccctgaggtcttctgggtctctccagggctcagcatgtagttgatgcctgccagtgctcattgagcaaacgaatgaggagtgctaacctggcttattaaaaatatgaataaggtggtaagtaatagaaatcctaagtgtgagaaaacaaaatcagtcaagtcttggtggctttttttaaaaagccggacctattgaagggtcttaaactgccaattttcaaacgattagacatggttagtcaccctggaagtatcttcctttcatttttaacatatgaaggaaggagtggaagtaaagaaccaaggaagactgaaagtcagtcttgtgtgtcacatgcattaaaaaagtcttttcgtagattcattcatagaaaaccatatgaccaaattaacccaattcagaaaactattaagccacaatcagaagcaaatgatctgggaaaccttcctaattacatttaaatgtaattgtttccacctcataaatgaaagtcaaacacagggtgttggagtttttaagcaggcctctaataaatcttctgatgatcgttcaggccagattttcattaaaaacagttctcagacctcctcgtttaatgttgtgaattcttctgacttttgggtaggatcaagtagagtaatgcattaatcaaaacagacccatgagatgagtaagataagaattaggtgcccagtttgttgaattactgccttgcctttttgagagagctatcctgattaacagggaactcacgtatttattttgcactctgggaaggaatttagagcaagttaaatagctgcatatggatctcatctcccatatccagtccatcagcgagttgttcacacacctcccaaacctttctcatttctgtgcattctgccgatctcttctctcactcacacccaagtccaagctcccatcttccccactagacccccgacccgtctctacatccaatatggcttcttataatggcagagtggtctttttggaatataaaaatgagcatgtcattcctctgccagaaaccttcaggggtctcccctgcccttgagataaagaccccaaccttactttgtcccacaaggtcctgcgtggcctggctctccctgctcctcctccagactcactgtgaatcacaggccccactgggcttgtccaacacaagccccttcctgcctcaggccctctgctttctcttccatctgttgggagcatactccctcccagtctcagttcaggtgtcccttcatcagggaagccagcccttgacccagaccctatgcatcttccatgcctgccctgtggcatgtaccacagacgactttgcatttgtctgagtatgtttgtgtttagtgcctgtctctcctgctcagcttcctcccgatgatggcagccgcatgcctgccctgtgctcactcactgtcgtgtacttcccacaagcactttgcctggtgcatggtgggtacttgtagttgttgatgtggaaatctaggtgttagcatgatgcccggacaagcctctcacctctttggccctctgcaaaactgttgactctgacccagaagaaagcccattcctccccaatgccaaacagtcaagtcacttccacagtggggcaaagcaagtgcagttgtcatggggtgaaacagacatgcagtcagccttccacggtgtttcaaccttctttttttttaatttcacagttagaaatatcagaccatgaagtttggtagctgttccttcatgtaatgaagctgcagctgttgccattattttgcaatttgttttctttctgattggtaagaatctggggctgctggtttctagggcctaatatgaaagtttccactgaagaaatgtcagtgtttgaactatgatcctgtgccaagcaggaagaataagccgtacccccattcactgctgtgcacacatacctgcccccaccgggaggaggggcccttttagggctgtaacaagtgaaaattctttattgcaagttcagcagagcaacgtctaatttggttatgggtttgtttgtttgtttgttttttgagacagagtctcgctctgtcacccaggctggagtgcagtggcagaatatcggctcactgcaacctctgcctcctactttcaagcaattctcaatgcctcagcctgctgagtagctgagactacaggtgcaagccaccatgcccagctaatttttgtatttttagtggagacaggacttcatcatattgcccaggctggtctcgaactcctggcctcaagtgatctgcccacctcagcctcccgaagtgctgggcttacaggtgtgagccaccgtgcttggcctgatttgattgttttgaagagctgccagaagtttcaagaggctgtgcagtagttggagggagaccatgggcagcagccatataggaaggttctttaggatcgggtcgagccagtctccataggaatgattacccaaagggaacaaggaggacatcatctcagacattgaagtggttagtggccctcccagaagccacagcacattccacaggtgtactgtggatctctctgttaagatttcatggagagaggtgggccactggcagaaagaatctaaaaaggctctttagggggtgataatgaattaaaaggtagagaaacacttgggggaaggcagtgagtgaaaaggcagaaatggtcaatgagggagagggcagagcatgtcctggcggaagccaggagccagacgaagagcccggagctggaggtggctcccaggagcgctgaggccccggccccttcaggccagtcagggacacagaggggtggcacctggggagacgggaagtgggaaggctggcatggacttgctgcctccctgctgtcggtagttgcgctgctggagaggctggggaggatgaggaaggcctggttggtggagtgatgggggtgcagggtgctgactgcccccgaggccgtgccctgcaggatttgtgagcacccatcagtgggcgtttgcccagcagtgctccgtttccaagaatggagtctgacaagcagataagccttgctccacccaagtccagcatattccatatgagccaagctgtttctcagcagcttcccaggcagcgcaaagcatttatggagggtcagggagatgtgtgggaatcgggttgttaactggccaaggcagggagtcccccagaagttcctctgatctctgtgaggaagagagccaagtttatgctggggccagtagacttaaagaggaatttttctactgcagtgttctcccacgagctcttgctgagcgcctgctgtggctgggcattgtgttccttgtgtggggtcctccaggagcccaggcacaggagggcgatggcccagaaagccctgggagggcggggtgtgcgtttcgtggctgaaggtggcaagaatccaccccacagagcaggctctgcagactgctcaccagggagcagggcccctgggtgccagcaccagctccatctgcagttcgctgtttctccttggtcactttgctggatttctgcctccgggatgctgtccaccctcatgacgggggccagggcgctgccgcagcacctataggagatgcgcagggcagagagcagcccctgtgtgacgctgccccgatttctcccacttagggttgacactgtcacggtaccacccggtgttcagtgctgaggacatacagtccctcccctcctgtggtggcaacagctgatgttaagaagggacaaatttgggcgaaaggagaacacaggctgtagttagagtgatggtgagacaggaatgaaggcccgcagggaatctgtgtgcctggaggcgagcattagagtcagatagccgcctctccaacccccatggagcctcgtgcccaaccagcaaggactctggggcatcggccagtggcagtaagccagtgtggtgggctggacaatatgcctgcactgcaggagacggtgtcacgatcagcccccgacagccggtctcaaaagtggaatttgaagagtggtcattgcttctcatgaaagtgtcgccgtaactcatgaaagtgtcacctgtaacgaatcctagagggatgcatttctgtaccacggagggctcgagccgagacaccgagatctgggggcgtgacccctaacctagtagcttagggagcagaattacaaacccctcatcctgtgcccatccttgggccctctcctcactcccccacagagaaacccagggtcagaatcaaccatgagacttgacggctgcccacaggatgatttactgctgtgacctcatttagcatgggttagtgtgggcccattttttcttttctttcaaaaattatttatttatctaattataaaatattaacctccataataaaaataaagccagtataataaaaatatgtaaaataaataaatgtcacttattcccagtatctcaagaaaactcaggattaaaatttttatttacattttccagaattattctctgtaagcacaaaacagatttttttttttacagaagtggaattgtactctgcatactgttttcttttttattttatttatttatttatttatttatttatttatttattttgagatggagtctcgctctgttgcccaggctggagtgcaatggcatgatctcggctcagtgcaacctcagccccctgggttcaagcgattctcctgcccaagcctcctgagtagctgggattacaggcgtgagccaccactcccagctaatttttgtatttttagtagagatgggttttaccatgttggccaggctggtctcgaactcctgacctcgtgatctgcccacctcggcctcccaaattttttttattatactttaagttctgggatacatgtgcagaatgtgcaggtttgttacataggtatacacatgccatcgtggtttgctgcacccatcaacccatcatctacattaggtatttttcttaatgctatccctcccctagccctccaccccatgacaggccccggtgtgtgatgttcccctccctgtgtccatgagttctcatcgtttaactcccacttatgagtgaagctggaaaccatcattttcagcaaactaacacagaaacagaaaacagttttcaaattaatatatcacacataccttttcatgtcactgaatatcagtctataacattctaatgactgtgctgaattttactttgtagacgtgccatatatttttaaccatgccctgttggtagacgtttaggctattttagtattttctatataaacatataattctgtataaccctggaatactcacatatatacataatatatatagcatacaaatgtataatctggaatatacattttgtgtacttgactaatttttttccattgctataaactccaaaagagaaattactgtgagaagggatatataattttaaaattgtgatgcctattgccaaattataatatcttcagaaaaagattgaaccaattagactcccacccacagtgaaggggagaaccagttctctgcactcagcaacactggcttattttctctctcatccctgggcgctgcttttggaggaagcagagtgttttcctccttagccctcccctccccactttgtctgtggccgacccgctcattcagtagctctctggaaattacaactttcaggcaacaccaaagaaggctctgtgatcaaagagagagggctggatgaatgctggaaggagtgtattacagggattgtggatgcttatctacttgacctccttccccttccctgtgcgaggggaaagggtgggaggaaagattcggcttgagtgtagccgagctgtaccgaaagccttctcgataccaatgcctgggctgggatttattaacttgtcattgacgtggatctgataagaaaactcttaccgaaggaacaacaaggcagtctggggaggaataaatggggaaaagaagaaaagccaacctgggtttattaacacatagaacaaaaggtatggatgagcactgtccacgcacctctgagaaccagccacgaactggcagagtttcactgtagaaacatccccaccccacccccaagtggaagctgtttggcatcctccatccccaacacggcctgtacggggcaggagcagatgacccctgggagaaaatgggatgcactgggaagatggcagctagaaagggaaatggagaaatgaaggatgtcagcaaaaccggaaacgcagcaaagggattaaaattcacattgggcacagtgaagagttcagttgactttgcagaaatggaaagcatagtggaaaaatgagattccttcctgaataaagagaaaaagagaatgtcgagggaccggatggatgatgaatgtgttttacgttgaaaagccatctcagtgtgaatgggaacaagagccagtgcgtggagaagccgcatgagagacccaggtgtgagtgctcgggtcagaggggctcaggatctcctgggtgcaggtggcaggaccaaggaacccctggaggtggcctctgccagggcatagagttcatcacaacatggaacctccatccctcctgggtaccaccctaacacttactttggaaaaccctctcccctggcttggtttactctataatgcaaccagcaggcagaggaaaaaagatttagagggaaccccaccaaaatagtggcatggctttctttcagtaggagaggtgtaggtgctatatttttccaccttttttccccaaaatttctacaatgagaaaaaaacattttattttaaaatagtaggcctctctcccttccctcacgctggttactgtgctatgtggccttatggtaagctaggtctgggtcagggcataggagaaagggctgccctgattgcagctgcttttttcatgatcatgggtggtgctaagggaggaagcttcagggcagatgagtgaggagaaggcgtccaatgcaaataaatgccttcaaaaaccagataaatctgtctcttcagcctggatccttaagcttctttcttgtctttaagtttctgtttgcatttttgaaagaaataccatgcatcctttttttatgactagaaaatataattttcagaaacagaatgcattagaatttggatttctggagtcttgatgggtgtaccctgttcttttctctgttaaacataattagtttcctgataaatgaatagcagaggaaaaaatgttgctcttcattattgctaatatatgaagaataattaaaagtcataaataaccataaaacaatttgcctttaatgatagcatctttaactgtgtaacatcctagcaaaaaagcctcattggacattctcttgtgcacagagcccatttgccgggaaatatttctgaatacatgttgtcttccctttatagtaagacattgtcactcaataataatatgcaagataacttcgtgatagtaattgttgttttgtctttgtaattacagacatatcaagtggatttgaagcccaatgggtcagaaataatggtcacaaatgaaaacaaaagggaatatatcgagtatgtatacacatatttactgccttttctttgaataattgaaatgcatgtttggtcactgtcccttgctgaaacagctcatgcatttattatgggcatgagtttattggtcagttttcaacaaggtaagttcttttctggcttgggctaatgggaagttgaatatgggatggaaagtctgtcttgtatcatgactccattgagctgccctataaaggagcagaggagggagaaaaggtctatattattgagtaatacggcaaatactcttttggaatatgtggatatcaactaagatttagaattgcaacggagaaccacggtgtcagtgaccagcagggcaaaattaggaaccaacaaagaaaaaatattttgtctctctcccaacttcttttccataatagaaatgtatagaaatagttaaaatggataggaagaattcagcatgtgcaaccctaaggaattctttctggtatttgtaatattcttaactcaacttcagcctcagtggaacaaaatgttgagtctttttggaagtctagctgttaagtgattctaagacatttgtaccaggcagaagtttttctctgttgggcacgttacgttttcttttttagtgtatatgtgtgcttcaaatgcataactctgggatcttccaaggagatcccctggtgcaggggtgaggtgagcactgcagtgtgtggttcctggcacctggtttctgctctcttgtgggtcgccacagtggccctgagttcctcgtttgcattcagtgcttcgtttcaacaggctaggctccctcctttcttctcatttggaattggtcagaggtcttgaaatcagacagctcttgcattgactgtgggtcttagcacctttcagtgtgatctgcaaagaaaaacctactgtccttcctaattaggaagaaacggagcgtgttagagtctctactcagagatcctggcaaggagtggaactattacatggcggactcttttcactctcaagttgaaagcttgttatgctgaatacatagactagaaataaggtacctcggttcttacctggccacattaattggcactctcgttctgaatatgaacaatcttagctgatgacatcctggcagacaccattgtcttccttcagaaagtacagactgtgagtggggtttaaaaaatattctagctcagggtgacccaggtctcaagtctgaggactctgacatgcgtggtatgtgtcttgcatcattctttgcagttaattcttttagggttcaaacgtggtgggagtcagggccaggcagggttccagctagctttacttttaaaagtataattgaaatcaccaactgctccctgatacctctgctcccctggtgccagaagaatgctgttgagctgttcattgtagcccaggaggtgccacctgagaggccgcacagtggttgtgctgcaggctggtcctcagggccattaccatggttacagtgtaccaccccgaaggtgagaacccttcagaatgatggaatgcctgagatgacatccagagtacatttgccttgcgatcagttttgctgtgcattaaacactgtcgcagggaacttggttttggtgaacttcagttgcataaggaggtcttaccattcatcctctaaattttggcattaaattatgagtgcaaatcattttgctgataaagcttatatgttattgttgaatattagcacattggatactagaatgaaatattagataactaaatgcattgtcctgagtacactttacaaatatgtatacatatatgtgggtgtgtatacgggtgtgtgcatcttatacatgtatacctgtgtgttcataccccatgaacttttcccttttctccatgttgtcacattttaaagcagttaaagcatttaaagcattttaaagcagttaagcatttaaagcagtttaggtcagccaaaccttgatgtgggggaagttaattactcttttgaaatctccagtgagattttaggtttttcacgggtgttccagggagtcttgaaagaagccatgaataaactaaacagtgggggcacagaggagaccctcccctctgctctgctgtcgtggatggaggagaagcactccctgttgcggagaaagcagtgagcactagtgatgatggaggtggttcaatattgtcctcttttctcctgcagcttagtcatccagtggagatttgtgaacagggtccagaagcagatgaacgccttcttggaggtaagccatgctggccagggttctctgccatgtgcctctggtcccgggtcgatgggggatcgcgcttctcctttagctagtgtggtggagctgatcagagacagaggcgaggctggggaccctgcaggaagaccgggatcgcacagctcacaccgctggccagtctccagcacaagagtgttcagccaccgtgccgccacctccttttccttttcacgggttctcctgcttgacttctcttatttttacatttgtcctgtttttaaagaggacgttttacagacttgatctagaaccattgtcttggagtttcaggcggtacccaagagaaggctgccttttgctgcagtgacaggttccaagaagcccgagggctcagagctgaatgatgaagcgcagtccccaaagtgcctggccacccctccctccctggatcactgctgcctgggcttgattgattgattgattgattgattgattgattttgagagagattctcactgtcacccaggctggagtacagtggtgcgatctcggctcactgcagcctctgcctcccgggttcaagcaattctcctgcctcagcctcccaagtagctgggactacaggcacgcgccaccacacccagctaatttttgtatttttagtagagacggggtttcaccatgttggccaggatggtcttgatctcctgacctcatgatccacccgccccggcctcccaaagtgctgggattacaggcatgagccgccgcgcccagccatggacatttttttttaatcccctgccctttttctttgtggcataattcattgcaggttctcttctatacagatacatggaaaacacattttcttaagctgagtttttatttattttatacccagccacctcatgacagcttttaccctgttacagagcaaagtgggcactgcccagatcgaacttttaatatcagggatgctcccaggcccctagcagtgggtgagggattcatcattttaaacagtattccacttggaccaaaagcaaaattctttcttaaatatgatatagtattagttacctcaaagatcacacaggaaacagcctcgtgtccacgtgactgattttctctgcactgaggcagagctctcgtggggtgatgctttcccttcactcaggtacctacacaggatgcgtgaaagcccgggcagcacactcagaaacagctcggggccttagggacttaaaatgggaggacagaatggcaggtttcactctttatttagataagaaatcccaggaagcagattcctgggccccaccgcaggcggtccacaccttcagaaacgcggcgttcgcagcgcgcagggcccagcagagctgagctcatcctagatcacgccacagttagtggtacctgggaactggagcatggttttctgtacgcacagtgtctgcacccatcacctgcctccctctgtgtttcttctccctgcctccagcacgttatttttaagcgtgtctcttacacatctgtagcctgtgcatcttaggacgcactgactcacagcagtgttataaatggcttttggaatccaccctgcctacagtatcccatattttcatcaggtttcagaaattactccactacttgaatcttctagattctatgctttttcgaaactgttatattgtgactgtgctgtttttactggaactatagttacttgatactgtcactgacataggaatcatcaggagagattatatttttttctggctaaccagaaaagtttgtttttcctgtgaaatttttttttttgaaggcaataggtgtttaagatgttttttttttttctttcagggattcacagaactacttcctattgatttgattaaaatttttgatgaaaatgagctggaggtttgtattataaacattattttatgtaaagtggattttttaaagtatctctcattactttacaagtaatattttaatattcttggatccataatgtcctagagagtaactttagatgaattatattacatgtctcttatagggcttatttgccaatgtggttctattacatgtctcttatggggcttgtttgccaatgtaggagtaaggaacagcaaaaataatcagctgtagttgccttgtccatcagagggcagttctggaacatgcctagtaagtagaggccactgagcagagctgggatcatggccctatgcaccaggcgaggcaaattgccacaacaagtagaaacaaggtttgcagtagccctctggacagcagaaacctgcttacactaccagactggccaagtatcctctgctgcatccccatccacccccaccgtggcagccaaatgggggtcttggccacaaggtggccgtaagcatctacttgggcctgtagaacgacgtctcattgaacttgaagtggtttatgttgagtgaggaaaaatgtcagaaggcaacagggttgtagcaaaaggtagtttagtgattgtctagttcagcttcttggtgttgacatagttgagtaacagccattttaaaaacaaaggaatatctcgccctttgttgtgtcgagagaaacaggggaaagactgtctgttgagaagccgttggtgggactcggccatttgccccgtccatagccagtgagtgtttcccatacactggccttctatacttttatctcaaaacagaaagttcaagatcgatgatgtctatagaaatcatatacctcaagcctttcctctgataggtgggaaactgaggcagagagcagctgggtttacccagcaaggttttggcacggtcaggcctaggaactttatttccaggcttctggcttagttctgtttccatttcattctggtacctttgcataaatatcttccatttgtccacaggaaacctcccctgatggagagttgcataataggaacggcaaaccttagactaaatgctaagtcgaagacccagttgtgccttagcgtatgtctgccattcttaggcctctgggcagatgaggtgatttgtcatcactggaattgatcaacctggaggagagtcataagcactaattcttttgtgggtagggagatgcttttagatattcagaggaataacctctcaggaggagaagcagccagggtaatgcacagatgctgctggagcgtgagagaatccacaggtcccatgcgtaagactagaggggtagggaggacgactgtggcatttttatatccgatacgacatgccgtggcttgcgcaaggttcgaattgagctgccctcgtgactgctgcctctgtgatctgctatggcaggtggagcctggaacaggtgtctgccttcctctgttgttatgatttgctagcttaccttcgcggcacagtgaccacatgctggcactgagggtggtcatttctcagtgtgtgatctcgcacctttcacatcctgcttttacatctggtaaattttcttcctagttgctcatgtgcggcctcggtgatgtggatgtgaatgactggagacagcattctatttacaagaacggctactgcccaaaccaccccgtcattcagtggttctggaaggtaactccggggcccagccccagccggtgtcctccacctgaggcaggattgagggctgtgtggcgccctccattgtggtctgacttcaggactgatgctggctttggggtctgttagagcttggactgctgggggagggaagaggcaaactgagccagcagccccgtggtggctcctctgtaactgtagcagacagctagacttgaatgaagttggtccctacaaaagcacactggccttccttgaccacctcgtgaaagtgacttttatttgagggactggtcctccaatgcgtaaatagaaatggggggcttctcagggcagaaacaggcttcagggatggctttgcaagatgccactttctgttaagaagtcgttttctcaatttttaaaatatattccaacaaatattttgatctgtgtatctttcaaccaaagataacacaacatttgatttattatcttagggccactgtttgtatcctgttcagcttaggagggaagtaaaataggaatgggttagtccaaaggagatatagtaaacaaacttaaaaaaaaaaaaacagttatcccccaaaaaggctgattatttacttcaccccaaaaaggaatcatttaactttttcaaatttatttttatttatttatttattttaaagatggggtctcactgtgttgcccaggctggattcaaattcttgggcttaagcaatcctcctacctcggcccctcaaagtgctgggattacaggcatgagccaccatgcccggcctttttcacatttctaaatgccttttattactatttcaaatgccagcaggaatacagagataaaaaagcaaaatcttcaaagcctagtccaggtctcacttggcttgttttagatgtttgcctacagcagtccaagtggcattaccagtaaagccacctggattcccataataatgcagatatgtaagatacacagattattttagaaccccatctttgcctttgttgttttgtttttgttttgttttgttttgtttcattttataaaatgatgtcttctagggaacgtgtctacaatctgaaatcccatctcataacctggcttccccttgtgatgacaaatcttaaatactgtatatttataattggcttagggggaactggtaagcctcgaacacagaaacatgagcttggtgccatcagagagtttgctttttatatcatttattttggcctattggcagaagaagaaagagacggacattgtgatcactcagtctcttagattagagaggccagctagtattgtggccataaaaaacctactcagttttcagagtcaactgtctaggtcttacattgcaatataaataagattaagttctgcctgcctgcatgacagcagcatgtgccatgggtcacgtggggggtataatgaccttctgcctctgttcataggctgtgctactcatggacgccgaaaagcgtatccggttactgcagtttgtcacagggacatcgcgagtacctatgaatggatttgccgaactttatggtgagcaggataccattggattcagttgtcctcctgggaatttccagccaggcatgaactctggcccaagaaccctgccgccaggcctctgcagaaggctaagtttcaggacagtgtgccatgcataggttccatgaaagttcaatgaaagtactgttatctatactttatatagataacatggtgcttctacttcgagggattggggggcagtttgtgaagaggtccataaggctgctcttttttttttttcctagtttagttttttagtaaatcgttaaaaactaggttttgtagggtcatttatatggtcgtaaactgaggtataaagtcacctccagtaggcagaatttttcagtgtttaccatagatttaaaaatcactctgtactttgcatactgaaagtcacatttcattcaccctcccacccacaaaactagtttgaagtttaaatttccagggcccagctgagaggctgtagctgcctgcctttccacgtaactgttgtgtttgttaatcttggtgcagttccattctggagactaagcagagtctttctgtgaggttgtgcagacctctggcttccctcaacattaaatatcaatgttgcagcagaagagagtgtcttgggcctcacccctgggggcaaaccctgccctgacagtagctggactgcagaccacaccatagcttcattcttctgccccaagcaatcttaacatttctttttcttttcttgtctaggttccaatggtcctcagctgtttacaatagagcaatggggcagtcctgagaaactgcccagagctcacacatggtgagtgacaaaaacacatgcatgtcaatgcaatatctgaactgcttagctgggtatggtgctgggctcaaggctattgaatgctctgtttcctgtctgtaagtagcttagagaattaaaggacagtgatgtggatgaaaatagaaattgtacagtagtgctaataagacataatgcactcagtatgtttggcacataaagggctcaggcctccctgctgtggggaatttctcctctgagcccagtccttccctcattattctaggtagtggagctttcactgttcagcatacatagataaggcagctctcaacctgtataataaacacgttgggtttttactccaaccttaaattggttgagaagttaggacaaaataccctgtagaaacatcctttttcaaaggccttctatgcccatgaataacctgtaattccctggaattgagcagtaacatgactgtggtcggaggagggtaagagggctgacacgtggccagggatgcccaagcgtggagcgtggctgccctcagaaggccctctcaggaggcacagtgacgcagaagggtcccagttgttttctgaacagttgcatgaaacccagcacaaatgcagactggatgggatcagtttcttgaagccgggttcagggagctcttgctaactcaaactcccatgtccctcgtgttggtttttctgcaaaggcctttatttcttgctcctgaggaagcagcagaagtgggccttctggaaaacggtgagcagcgtagccctgtgtttctcatgcagcgggggctgcaaagcctgctctggccatagtgagctaacataagcaaccaaacactccctgcaggaaacgccctcccttacactagaagtgctggccaggagagaattctcatgaacatgtgtttgcgaaaaattggctgtgaaaggtttttcacttctgtcggattcccttgcctcaccagaaaggtgttttttttttctattcgtaccattcacgtgactctccagatggaaacaatgtggtcattgcctgtcagagccttgaaagcaagctgactccagcctaaaattcatgaatattcagagcagtcattgtccgtggttctctggctttattctaagggaagaatgtttgagtagttcagagcttttatccaaatggtgtccaagtcatatgtggttttctgggttctactggcctccatatgaaggcaccagcgttgagccaagccccaggactgtgggtggtgatgcgaaactcaagctcataatactaaccaggatgaagattaggaaaagcgaaattattgggcacagtcatcatctgtggtcaggcactgcttaatctttatggcagccttatgagatatgttattcccttgggctgtcagaaggctggcccagggctcaccagagtcacagattcccagatcacaggatttgaactcagagctaccagaattagagcctgcaccctttaccactacaccagatacactgcctctgttgatatacccactttctttttagacttttccaaggaaaccaaattagtgaaccaatttcatgttcattcagcccatgtttctctgtgacttcagggacacatatcttactattgaactgtcttttttatttcggagcccacatgattctgccacaagtagaacttcccagataagacctctgaactcagtggttctcaacctcagctgcatgttggaaccatctagagagccttaaagaaatcactgatgcctggaatttggacttcattggtctggtgtgtgacccaggcagtgggattttcaaagctccccagatgatttttataggctggcagggttgaaaattcacagctcttccctaggaagggcaaagatccacctacaggaagggaacaacccagctggctcttaccagaacttattttcctctttatgtgtcacggaaataaagcaactgtgtagttttcctaatgatgttctccccagactaacttgacccggatggagaggactggcagttgcaagcaacactggctagcatgagtgggactgttctgctgtttcttctaaatggctttcctccctacctgaccctgactgtattttgacataggaaacagaaacttcactggctgtttcgtggcaacagttctgccataaaattttgccatacataggtttaatttcttccacgttttatgatacacaattaaagttcagaataaaaatctgatttcctagaagagcagaagctgaaggatctggttctctgtgatgagggtacctttcattaagctttccaatggtgattattgagtgtctgacattcaaaggacttcatttcattgttctataaaaggtcactactcagacatttaaaattactcttcattaagaatcacaggcccacctgcccttttaggtagactctaaagcaaacaaaaatcatctcgttcagcccatgcatcttccacgtgaggacgctgaagccctgtgaggacaatgagctccttaaagtcacccagctcattagtgcagagcaaagccaggtccgtgtgtcctgacctctgaaatgataggaactcacactcaccaagcactctgttcattccggggatggtgctcagcacttgatgcgattgactcataccatcatcacagtggccctaagaggtgggtgatgttatgacccacttttttacagataacactgggatgcaaagcggtgaagcattaagcagcatgattcagaacctcagatcttgacatcccgtctttgcctctctcttcatcatgccagtgtttctcaaacctgaataatctgtgcaccttttttaaagggaaaaaatggtcacagattctcaagaatgggcctgagacccccatagggattgcaggcccgggactgtgaaaccccagctgaaaagcctgaagccactttcggtgaaaggctcttttaaatgccatctgtagatgtgaagtcctgtctttattaatatgataatagaaagttaaaagcctgtattagtacttgctcttttaggattcctgggttcctgagaaccccagtttgagaagcacagtgttattctctgtcttttagtgtttagtggctgttagagaatccaagtggaactcagtgggacttattcaatatttagtggttgttaaacggccctctacggtatgtgtttcttttctgttgctgtgacaacggttagcttttagtatatgtgcaagtgctgccaaagcgagcacgtgaatggttagcttttaaaacccaagaagttactttgctcattcttggaatcacacatcaatacctggagggggcggttttaaacacagtttgagcactcgcggcagaggcagcacaagtgcacttcaagagctgggctttggagcaccccagggctgtacctggccccgtgtgaccttgggcaagttacctaaccttgctgtgtctcaagctcctcctctgtgaaataggggtgaagcattagctgccttacaaagtgattgccagggttcataacattgagacaaggctgatggggcatggtgagcactccatgaacatgagctcttacgtcataatgagctgtggcaagtgtgcatgccattttcatgacagatacacatcagcaatcaccccccaacacatacacacacacacagaggtgcaggttctgtggctaaaggctctggtcttgagccccatgtagacatacagtaaatgttgaaaggtgttaacactgataccatctcttgagtaattgagcccttgctgtatgccgggcccactgatccgatccacttggcactcatatgtgcagtttccccatgtcacagaagcacagaggccatccatttgtctgaaaaccctcactattgccagggcgatttgcagcccccgcccccacctgaagcctccagatatgtagggactttttctaaatgcaactttacatagcaaatgtcaattttgcctgactttgatcagaggaggtagcttagcactggtgttcccgagccccggacagcctgggttctgtttgtgggtctgccgtttgacaaagactgtgacctcaggaaccttgccctatgtctctgctccaggagctcctgtgcagaatggagataacatgacctgcttcatagggttgtgatgaaaatgaagtgagttaatagggagaaaagcacttggcttgaggcctagtgtggaataagtaatagtattagagatagacacagtcttaattcgtgggtaactccaaaagcatcagctctgtgttccaagggtttggaaatcttgccggttactcccttcccaccaggattcctccgagatctgcatctgactatagcaaaggtttcatggaccatttgaaaatgttctttctctgtaaattacaagagcttatttagtgtggatgtttcatagctagaggtttttggggtttttttctccaggtaatcaaaattgttggttaaggcttttttattctcttactcaaacctcatgccctattaaccagatcgaggaagtgctgttgtggcttttcacctacactttttgttccttttgcagctttaatcgccttgacttacctccatatgaaacctttgaagatttacgagagaaacttctcatggccgtggaaaatgctcaaggatttgaaggggtggattaagcaccctgtgcctcgggggtggttgttcttcaagcaagttctgcttgcacttttgcatttgcctaacagacttttgcagaggcgatggcagagagcagctgcaggcatggtccctggagccgagccttcaccacgcactcgtccaagttcggatgcgggaacctggtcccagcttgagttcctgcctttcccaccacaaattatcaactggttgatgtgtacactaattacatttcaggaggacttaatgctatttatgttgtgcctctgcaggcaaagcccttaataaatattttacatcctttctaatgacaatgaatggaattaatcactcaacaggtatagtattacgactcatgtttactttttaaaatgatttagaccgattttcagattttatttcgttatgattaaagatgtctcatgtacttggaaaagtgagcatttttttttttttttgtatttcactttcataccaggcttaatgtcaatgacatttttatttttgaagtactctgacacctccaccctctactttattagaattggaaggcaaatttttgtccaaaaacctacagacaagtactttgagagaatttccaatataatattagacataatgataattttttccatactcagaatgaaaaactggatattacgtttttgttttggggtttttttgtacaaatttagctaatagctacaggctgagagaattgtaacatagcatgacaaattttgtgttgacttgaaaggaatcacaccattattccttagaagtaattacatgtgttctaacacatttgagacagggttggactcccatttctcatccgagaaattacttaacccttcctggcgctgtacagtcatcttttattctatttcctctttgctgtttgtagtagagacattttgaatgaaacttggcactgcttgattcaaaactgtggaaaccagatctgtttagtctcctgtttgtatgcgtttgctaatggtagctaaataaccagtttttgttgtaaatgcaccaattctgaaggcactttatgtactacatggaggtcatatctggttttgtttttatttttttatcatgaacattaaatgtgatgatgatttcttttccctgcacacatctttccggtgcaatatctatcaattgtgaatctggctgctggtgtataaaaacctggatgtaaagctgagcctacagacctgtcctcaccaactgttttgtgatttctactcaactacaaagatttatttaatgtactcttaatctaactgagttttgttaccaatgacctgttgcatgcttcaataccgtgtactgcctgagttgtgcctcttgtgtgctagattaaaagtgagacagagacttgacttgatcctctgagctcaagctattgagctggtagtggcagaggactgagggtacctgcacagtttgattcttttccacgtgtaagtctccattgcagaattgtcgtgctttgagaaaacacctgaggcagtgtgggagttgaacgaccctgctgtcctttttaacctgtgttgtcctagaccctgtcggggcagtcaggggacactagagatttgatctcatgcgagtcatcaataggacaaaaaagttgtggtttggggaggtctgtttgttacataaaaaggacctttcggtgtaagaaattgccgtttttaccctgccctggctggcatgtgagaagccatggaaggttgtggttgtaaatgagttgtctaaaggggtgcagaggcctgaggtttctaaaagaaggtagatttctacagagctgagtgttggttcctttttcttattggttgaaaattacctggtagtgatcagaaaacttagatgctatgtaactaaaaaaaaaaaaaaaaaaaaaaaaaaaaaaaaaaaaattcccgctcatgagttttgactattggtgagatgttttccgctacagttaacatgacaaatgtctcagtggcaaaaatcccctttttgtaagcccccatagtctagaggcagttttctttttaagaatcatgccagagcctgagtcgagcagtatgctttcttggtttttgagagtaattgtgtaattgtagagggagaaatccaattctaacctaagaactgggattcttctgtcatcttgtaaaccgtatattgaaaaaaacagaatgtcactaaatgcatattaagtcaagtattggaaagtataaaagaaaaatcattctgacaatttctaagccagaagcaaacaagaattactgaaatctaccccatgaatacttggaaggcagtaattgtgagtgacacctcagttcatcaaccccttaataatatcagcttaattttaatgacaactaaatatgctgaagtgaggatttagtattttttaaaaaagcaaaacaaggttcagtagtcctcagcaattctccaagtttctctctttgcctaaaatggtcatagatcttgatttctctgaatcgtgatgaccacacccagtcatcttcacagcataattgcaggtggcagtaaagagagtgtgctgggtaaggagcagttgctgggtcattccttgggccccgacctgcccggggagtagccctgggggagagagggcagtgttgcctatcccagaggtcccagcagtcacactgctctgcaggccgggctctctttatagccagagaaatcaccttaatgcagtctctttagttgtctgctgaagctgtagttattatgggccacttacatgaggctgagaagtacgtgccggagctcacacactgcctgttgcggttctcttaacatcagttatcacagctgcctgtgggtcccgggtatttccattcctgccccttgttggcccgaggaaggatgtggaaagagcacctggtgggatgaaggtccaacagcctgtgcctctccactgctggccctggagccggcagcagtgaggcattcattgtctgtgttgcggtgtattcccagcttcagtgctcttttcctttttgcctgaaatgtttatgcttctctgcagccagtcctctaacaaatctcaagaacaaaggtaagacacttggtttttgtttccaggacccttcagaaggtgacatcagatattccctaaattcagacaatgagggatacagagcgacttggcatgtattatttctcccatgtaaggacaaagggacagattattattgttatttctgagacagagtcttgctctgtagctcaggctggagtgcagtggctcaatctcagctcaccacaacctctgcctcctggcttcaagcgattcttctgcctcagcctccccgaatagttgggattacaggcacccaccaccacgcctggctaatttttgtatttttagtagagatggtttcaccatgctggccaggctggtcttgaactcctgacctcaggtgatcctcccgcctcagccttccaaagtgctgggattacaagcatgagccaccgcacccggcctcacagtgacagattctgagaaacagcatgcaaaacatttgaaccattttctacatctcccattgttgcatagagagtgtgcaccgctgctatcttgccagatccacactggtcctcccgaaagccaggttcatacacagcaactttttaattattctaacagttacccattaacagtcgactcctgtatttctgagagtcttgtactcacctctgaaatttaaaaacgtataaagagagcctgggttaatcagttctgcagcccctacgtgacactgtgctagttctccttcttctgtctcctccttaccctggccctgcacccctgtacttaagagggagaggtgggaggtgctgtctggtatcatttgctgcctcgccagtagagggtgccgctgtgcagggtaactgcccgcctgctcccttcctgacctcccctgaccccgaagatcactacctctgtcattcaggcattggggtacatcctgataagtcgtgtcagaactgccaatttcaggactgagatgtgtttttaaaaaacaaatccttataaactccactttgtactttagattttaaaactggggaaaaatgtgatattctttggaccacttttttaatttatataagccttaatgaacagtgtctatacatttgcatacacacacccccaccccagagtgttctcagtatgtcagagaaagtgccacagcattaggacgggagcttggagaacgttttctagaaaagggttagcttcctgttggcatgaaattttccaagcaaacctcattaaacatctgttgtttgttaaagatgttccactgaaagcaacgcatgtttcaaaggcacgtctttccgttcgttggttttctgtgtgtaaggagtagcattgctgttggcgcctaacctcgcgtgcactgcattctcaaccccgtaccagtgcatcatcagaagccttcctcgtgaccataactctgtgtctgcagatatgtgttcccgtgtaagccagttttccccttttactcagactgatttcacctagattgtcacggtttccttcatgttaactttgcgtgactttgttcttcctttactactctgtatgtaatatatatacatatatacgtacatatgctgtccaaatatatttgtatatatttgtatagcatttttacacctttattgagtaatctggtttcgaaaggaggtgagagtttagtcccttctgcagttttctccaagctgtgtcctgtgaatttcaacccttggagcctaagaaaaccctaggaagatgatgttaatttgctgtcatttcctaattcaggatctatcatcaaatgaaacatgaaaaaaacagtgacttttaaggtgaaaagagtttcaagcattccaaataaattatcaatgtttcataactttttattataaacccacctcctaataggaagccaagtactatttgatacagtggtaaaaaccaaactaccttgaatttttttaaggcaacttatgaataatgctcattttcacagtcagaatagctttaaaatatggttgaatttgatacacacaggaagttttcttgaagaacaatcctttcgcttttcttttttcttgagagatctaaagagaaactgtagattgttttcctgacagcaaaagactaatgtgacaaaatgaagtcattgtaaagaagcgatgcaacttgtcaaatatttaataaagaattatggaagctggaacattttctacatcaagtgttatgggttgtttgatttaaagcttctttgtgaatgcaccatcttaattgttgtcagaggggtttaaatgcctgcagatttatagtatgttcatttccttcatctccctaaaagcgccgcacttttaaaaacattaaagtctggcagggcacagtggctcacgcctgtaatcccagcactttgggaggctgaggtgggcagatcactgaggttaggcattcaagaccagcctgaccaacatggtgaaaccccatctctactaaaaatacaaaaaatatatatatatattagccagacgtggtggcgcatgcctgtaatgccagctactcaggaggctgaggcaggagaatcgcttgaacccgggaggcagaggtttcagtgagctgagattgtgccattgcatgcactccagcctgggtgacagagcgagattccgtttcaaaaaaaaaaaaaaagtctgcccaaaacacatggcttaagcctactaaaaggatgcacatttattcttatccgtctgctgttttgttcttttattaaacttgagaattactgattttacgtaacatttgtataatccatgttagtctgttcctcaaaaggcatccttgtatacctagccctcaacttgtgtgagagttaataagactcaataatgaatccccaagttgcttctcagaaaggtgctgtcagaatcccgaccgtgtgtcactgccctgtgcaaagccggtggcatttttcctcatgccatttcattccgctcagatcatctcagactcctggagaattttccctttttctttagtactgagcttcctcttgatgtgcttaacccatcccctcggggcagaggagatagctagcggggaagcaggacatcatttagtctttggtttcttgcggcttgtctttttccattaacagtagatggcatcttgccagaaagctgtccgcagcacttggaattcctgccgcctcctccagggttatgagtacacatgagaggcacaattggacagagtcactgtgaatatttatatgttctttcttaaaaccacacatggtggaacgaattacatcaatgacacagttgctagattaatacgcttttaacctgctctgaagtccaagactcattaggcacttgtgagatggtgaagcccctggtaaaagtgtttgcggtgagcatgggtatcctgaattctgacactagctttctcggggttggctctcagagccatgttcaaaggggttcctgaggtaagaacgcagaagcctctttctgggagagaacacttctcaaaacagcttccagagagctcaggctgtagaatctctgaggaatcatttataggacttgaactgggctggaaaaaatttgagcatgagtttacttaagacccaagacacagtccttggtaagtaggccgcagtgcccagatgtgacccagtggggactcaagagggcaagaagggagagtccctgttgggaaccttttagggctgaccttaggccagactgggaaaaaggtcagtctccccaattagcctgttgctgtgttccttcctgcccagcccacttcacagtgccccgtgctgctcatgtgcctcctcccctttcctctgcaaagttcccagctgggctgcaagtctcgggtacctgcagtgttgacagcgcagagccctcccgtcacctccaggcagagtggccctcacttcacaggggcctcctggggacaaggcgtcctgagccctccgtgcttccgggtgaaggtcagagactgtccctgtgtcacgttctcccaggcccactcaaagcacaaagttccacaaggggttgtggctcttccaggtcctctgctggtcttactgccttggtgtttgaaatgacgactgcaacaacttcatccttttcttggccaggtgcccccagaaactaccttttcagatatgcccttttaccagggctccaggccccctccctcacagctctgcagccttgctgcacagttccccatcggaattgtgaggggagaccgtgtttcctccacatgcttttgcccactccccacatcagttcttggagtaagccttttttcctctccaaggaaagggcttacttgcagacgaattagtttggaagtacagtactagagcaagcacaaccccaaactgagcagactgaaactgaatagggcccagaggatgggtgagagccacattcctgtgattaaaggcagatttgggtggtgtctaagcaatacccttcctagggagttttaaatactgttgctagaatcagggagtcgagttctcaatcctgtttggccttatccagactgagtaccaaggctaaaggcagaaggttctgcgctgcagagtgcccaggtgtcagcggctcgaatcacgtgatcgcagaatatgtggccctgcagggccggccttgctttgtctaaacgctctcctttttcatgtgagtcccggggttcttgcccttgatcaatccagatatgaccagtactgtgggcctggagggccaggttttgttgtcatttgtggccttggactctgctggggcagccttgcctcccctgtacagacccagaacagctgcccctgtgggcgcttctcccagctagaaacctgagggctgatgggcgaaggtggttggcttccgactgcccccgtgggccgcggaagcgggcaggacctcattcaccccaccacctccaccgaggggcttgtctgcagcagaggggctactcaacattgagctcaggaagggaggccaggaggctgcatgaacggcccagcctgggcagttgggggcagcggggaatggacagaccaccttggcctggaggtaaccccagcagagacacggccagcagagttccatccttccgcttcccagttcgggcagaaaacccaggttttcccaggaaatctgcaagcacattaagctggtctctcctttaaaaaggtgcaaggatggagacagtcctacctgtcctgagcaggatgggccctgtgccaaggggccaggcagtagcaggctggcactctaggtagggaaggggccaaggatccccaagaggagttgacagcaagataatttaaagagcgtaagtaggccaggcgcagtggctcacacctgtaatgccagcactttgggaggccgaggtgggtggatcacctgagaggtcaggagttcgagaccagcctggccaacatggtgaaaccccgtctctactaaaaatacaaaaattagccaggcgtggtggcatgcgcctgtaatctcagccactcgggaggccgaggcaggagaatcgcttaaacccgggaggccgaggttgcagtgagccaagatcgcatcactgcactccagcctgggtgacagaacaagagactatctcaaaaagaaaaataataaagagcgtaatctacctcctgtaacacatcatcccggcatgggagtatatcttggcaaacatccgcaagaaattttgtctttcaggacagggacaagagcccaccatgccctctgggttatgccttgtcttcctcaaaattgaggagaagcccttgagctggagcaagatccaaaaagctggagcaaaaaaagcagtaggtgggaattagggccctcgtaccccggggcctgctatactctccagtcctcaatcttcgaacagtgaaccccgagatgtggagctgggggagctggccctgaaggccgagacaagcctgcagtccacaggcacgggcccgggactgcccacacctgttagatgggcacaaacggggccttcgctgcccggcaccaatctcctcttgcactggggccctgtttccatgcagtgccaggggcctcaatcattagctctttcagtgtaatttgcctcttttggtttaaaatagtctttgggggataaatattcaatttctagattaaactccttgttgaggctctttcctccggaggtccctggtggatcctcatgggacaggctgaggcgggctctctcctcgggcctagggtgtcatgctctttgtcccctgaatggggtcgcaagtactccagggccatcctccagggacatcttgctggcctctgtgatgctcacctgagccccagctggtcggtcagccctgaggctctcagccatggggtcaccctgccctcaccacagcctccctttgtggcactccagcagggccctcagccctttctgcctctctgagctgctcacctgcacctgagtgagcagcctccaagccacctgccagagcctcccacggggctgggaaatacctagtggcactcaaaagaaaagggaaggaaatgggaacaataagccaagctgccgtggagagtttatcttcagccttaagcatctttttacagagtgaatttcccctggggacagtggtcttcctgccatctgccaagcttctggggtcttcagtttaccctcttataatatttccacaccagcctaaagaggtagatattattagcaccaatgtacatacaaggaaacagactaggaggttaggagactcgcagagtggtactctgaacccaggttgtctggctcaaaggcatcatttaaccaccaactctactgcccattcactgcccctccatcaaaacctcctgtctgagaaaccagagtgtcaagacagaagaaatcatcaataacactgaaggcagcacactaaaggggagaaagaagactgggaagtggtcgttagatgtgaccacctggagatctgccatcctactgcccacacatcctgaagaacaataaactcattcgtactaagatgtgaatgactgataggctaaacacatgacccttccagaagaatttttattttaacaaataccaaaggtgatgcttggtttatatcaaaaggaataaagatcaaaattatggcatttatgtcccagcaaattggggagggtttttttttgtttttttgtttgttttttgttttatttttgttttttgttttttgtttttttgagacagggtctggctctgtcgcccaggctggaggtcagtggcgcgatctcggctcactgcaagctccacctcccgggttcacgccattctcctgcctcagcctcccgagtagctgggaccacaggcgcccgccactatgcccagctaattttctgcatttttagtagagagggggtttcaccgtgttagccaggatggtcttgatctcctgacctcaagatccacccgcctcggcctcccaaagtgttgggattacaggcgtgagccaccgcgcccagctggggaggtttttgagggtagggggcatacttaagtttacaaaatccactgacgccagtggaatacgggatgccagcacagtgggaaaagacagcctgatctctgggacagccccagtttcagcacttaaaagacactgcactgcctttctggctgccacaggacagaaccccccgcctccctccagcctttcccacaccacaaaacaagcatctaatattttccagggaccttccagggacaacacaaacttccctttgtccaacagaattgaagggtgaagggaccagagactgaggactggattttctactcccaggaactccttgatggagctctgagatgctgaattttttaaagagtttctgttattaaaggattttagatattaagttgtaacatacagtcatgcaccacatagacatctcagtcagcaatggactcccatagacgatggtggacccgtgagatgataatggagctgaaaaattcctgttgcctactcatgttgcctagtgacatcatagcctttgcaacccatcaccctttctatgtttagctacgcttagatgcacaaacccttatcattgtgttacaattgcctgaacagaacagtcacatgctgtacaggcttgtagcctcggagcaataggctggaccatatagcctaggtgtgtagcaggctatgccatccaggtttgtgtgagtacactctgatgtttgcacaacgatgaaatcgcataacaacgcatttctcagaatgtgtcccagttgttaagcaacacatgaacatgactgtatttaatattgtttatagcagaaagttagagtttgggatttgtcttttgaattctagttatgtagctctcttagcaattctaagactctgccactagggtcatcaccctccctcacaacccctctcaccatgacctcaacccccatcctggccccctcttgccttctctgcattctatatttacttagaagatccttgcttgttcatgagttgagattgtcagggggacatgccctccgcaatgtaatgagtgtttaaacaacagtcaggcctttgaaccccaggctccagttaaaaagtaacaggctagatactgaatcaataggaggcaaatattagctacggaggctgagagagaccgagttgggaaacacttgttgctggtgacatgcaaagagcaatggccatacccacctgaggtccaggaagccctgggagccccatgaccttcggcctgtcattgtcctgctctacatgttgtaacattgaagccaccagcccttaattagcttctagacctccctcagtctggacttctgcaatatcccactaaatggtgtccacctgatttttccccttcccagccatcttacactcatgtgagcctgcttccagcaaactctgatcttgtcaatcttctgctggaaaattttccatgactccccattgcattcctgactggtgcgcaagggcatctacctgctctttgggacgtgggcagggggatggcagatctccaggtggtcacatctaaccaccaattcccagtcttctttctcccccgtagtgtgctgccttcagtgttatcgatgatttcttctgtcttgatactgtgtctttggtttccatgacatttcaatcttctggttactctctcactcttcaaatactcctactattttttctcctctcctaaaggtaggtgttccccaataatttgttcttggtgagctctctctctctctctctctctgtgtctctttctccttttcctcctcctcttcctctcatggcttaagttagtacctccatgtggacaattcccaagtgtatctctagccccagcttctctcagggccctcgtctccaaaagcctaatggactcatcgtaggacattcctcaagtcacccaaactctaaatgtcccaatctgaactcacacttttaaacctctcctcctccgtatttccaaatctctgggagttgttctcttgtatcttccaggcatccacactggaacttcctcagtgacctttcacatggttttgctccctaggttgaaagagtgacaaagttcagttttctattcatgcattcactcattcattcaacaaatatgcattgagtgcctgccatgtaccaagcactcgtaggggttaggaatacagcaattaaaacaaaacaaaagaaagatcacttccatcatgagatatttatatgtttctcatttagttgcctccactagaaatatgtttctcatttagttgtctccactagaatatgtaagtacaatatatggtgtgttaaatgttgatgaagccaggggaaaaaataaagcagacgaaggatccaggtagtatgggagggtgcaattttggatggggtgagtcagggtaaagagcaccaggaggtgagtgagcaagccatgaggctttgggcagagaaacagcaaatccagaggtcttaaggaggaacaggaaacaagatagagcccctttgggactataccaaggtgagccatctgttagccaagtgaagggtcaagtagaaagtggaaggatcatggatgtcaaggaggtccaggctggagctaaagcatcatcagcgtgtatatggtctttaaagctgtggcactgaaaaggaggggtccaaggacaggagcatgagatggatccaggaaaggaggagtggccagagaggtgacaggaaaaccaagagacagtggtgaccctggagaaatttggctgggaggagagagtttatttatgaaggacagaccaagcgtggtatggcctgctggtaggtcagcaagatgaggactgagaagcgacaactggaattatcaatgtggatgtcattggtggccttaataggagagattttgctggaatttgggggcaaatgcccccaaaagaaggggaagaggaactggagacagggacacccatcacagctcaggcatctggattcttaccttcatttccaccccctctccaccttgcttgcctctgtaactgctgcccaagttatgacaataatgtcctgactgtacctcccacttgttcccttcccagttcccagtccagtttgcactggtgcagcccaactccaatatctacattctcttgcagaaacccttcaaaggcttgcctgtattgaccaatgaaaatgaaactaaaatctacactccttatgagcaagggcattcaaggtcaggctcataactcaccttttctctacgctcctatagtcacatcaagggaaccgttccatccccatgcagcccttgcattgctaccttctcgcctgtgctcccaccactctctctactcagagtgaccttcccatatatccaaatctagccaaccttcagggcccatctcaaatgtcacctcctccatgaagccctgcctgattcacctcaccaaatgaagttccaaccctcctctgagtttacagcactttgtccctttctgtctcttattgtggttattagtatggctatctccatcctatacatcacccgaagcacctgaaagcgtggggctaaatcaatgctctctgtaccttggatgctcaataaaactgccttacagtaaactagatggtgctggggaatggggatggggtggtgtttctggctatagggaggtttgggattgtctgtagatttctgtttgcggatctttgctgtttcctgcctgtgtgtgttcctgaataaacagtcagacactggccaggctgccgaggattgcccacctcacaaccctgacagaggggccgggttgactacaagacagtcatttggggctgggagtctgaaggagaccgagttgggaaacacttgctgctggtgacatgcaaagagcaacggccatacccacctggagtccaggaagccctgggagccccatgaccttgggcctgtcattgtcgtgctctacaggtgattacagaggctcacacctgtaatcccagcactttgggaggccaaggtgggagtatcacctgagcccaggagttcaagaccagcctgggcaacatagtgagaccccctcaaatctctacaaaaaaattttgaaaactaacagattagccaggcatggtggtacttgcttgtagtcccagttattccagaggctgaggcaggaggattgctcaagcccagaagttggaggctgcagtgggccatgatctcaccactgcactccagctgagggacagagcacgaccttgtttctaaaaacaaaagtcaggtagagtctctgacaagagtgcaaaaggggaggcaacgtgacagtcgtgaagacactgaaactgcaggaaatgatctgagacagtcacgctgccttggcctgagtgttttggtgcctgtcggctctccgacattggaaaggtttcctgaaaagtagcaaatgaatgagctgccttttttgctctgcctctcatacttacagacacaatttccaagcctcctggtctcagcaaaaatttagttctccagagatgccagtttccctggaggcctccaggtatccgagccacacttggctgtccgtgcagaggtgcctggcaaatgactcctggtggctgcttagcgatctttaggttttcactgaggatacgattaagggacctagtgtttgggaaaggaggcagccctggagg

SEQ ID NO: 351 - DNA, 8348 bp, Homo sapiens
ccagtcacagaggaagccatttccagagaggaacaaccgtgtagactgctttcctgggagtcaagttaaaacttctctcctgtgaccttgtcacccggcagtggaaagttacccttggctgcagccacgacttccgcatactcttcagaacttgctctgcccttgagttttccagctttcctttaatgcactaaacctttaatattgtattctcctaaatgagacgtctcgcatttgagcaggtaacactcgggagagtcccgtattctcagagtaaaagttgtttctggaattgatctcgccaaaaaggacatctttggagccagtgatccgtatgtgaaactttcattgtacgtagcggatgagaatagagaacttgctttggtccagacaaaaacaattaaaaagacactgaacccaaaatggaatgaagaattttatttcagggtaaacccatctaatcacagactcctatttgaagtatttgacgaaaatagactgacacgagacgacttcctgggccaggtggacgtgccccttagtcaccttccgacagaagatccaaccatggagcgaccctatacatttaaggactttctcctcagaccaagaagtcataagtctcgagttaagggatttttgcgattgaaaatggcctatatgccaaaaaatggaggtcaagatgaagaaaacagtgaccagagggatgacatggagcatggatgggaagttgttgactcaaatgactcggcttctcagcaccaagaggaacttcctcctcctcctctgcctcccgggtgggaagaaaaagtggacaatttaggccgaacttactatgtcaaccacaacaaccggaccactcagtggcacagaccaagcctgatggacgtgtcctcggagtcggacaataacatcagacagatcaaccaggaggcagcacaccggcgcttccgctcccgcaggcacatcagcgaagacttggagcccgagccctcggagggcggggatgtccccgagccttgggagaccatttcagaggaagtgaatatcgctggagactctctcggtctggctctgcccccaccaccggcctccccaggatctcggaccagccctcaggagctgtcagaggaactaagcagaaggcttcagatcactccagactccaatggggaacagttcagctctttgattcaaagagaaccctcctcaaggttgaggtcatgcagtgtcaccgacgcagttgcagaacagggccatctaccaccgccatcagtggcctatgtacataccacgccgggtctgccttcaggctgggaagaaagaaaagatgctaaggggcgcacatactatgtcaatcataacaatcgaaccacaacttggactcgacctatcatgcagcttgcagaagatggtgcgtccggatcagccacaaacagtaacaaccatctaatcgagcctcagatccgccggcctcgtagcctcagctcgccaacagtaactttatctgccccgctggagggtgccaaggactcacccgtacgtcgggctgtgaaagacaccctttccaacccacagtccccacagccatcaccttacaactcccccaaaccacaacacaaagtcacacagagcttcttgccacccggctgggaaatgaggatagcgccaaacggccggcccttcttcattgatcataacacaaagactacaacctgggaagatccacgtttgaaatttccagtacatatgcggtcaaagacatctttaaaccccaatgaccttggcccccttcctcctggctgggaagaaagaattcacttggatggccgaacgttttatattgatcataatagcaaaattactcagtgggaagacccaagactgcagaacccagctattactggtccggctgtcccttactccagagaatttaagcagaaatatgactacttcaggaagaaattaaagaaacctgctgatatccccaataggtttgaaatgaaacttcacagaaataacatatttgaagagtcctatcggagaattatgtccgtgaaaagaccagatgtcctaaaagctagactgtggattgagtttgaatcagagaaaggtcttgactatgggggtgtggccagagaatggttcttcttactgtccaaagagatgttcaacccctactacggcctctttgagtactctgccacggacaactacacccttcagatcaaccctaattcaggcctctgtaatgaggatcatttgtcctacttcacttttattggaagagttgctggtctggccgtatttcatgggaagctcttagatggtttcttcattagaccattttacaagatgatgttgggaaagcagataaccctgaatgacatggaatctgtggatagtgaatattacaactctttgaaatggatcctggagaatgaccctactgagctggacctcatgttctgcatagacgaagaaaactttggacagacatatcaagtggatttgaagcccaatgggtcagaaataatggtcacaaatgaaaacaaaagggaatatatcgacttagtcatccagtggagatttgtgaacagggtccagaagcagatgaacgccttcttggagggattcacagaactacttcctattgatttgattaaaatttttgatgaaaatgagctggagttgctcatgtgcggcctcggtgatgtggatgtgaatgactggagacagcattctatttacaagaacggctactgcccaaaccaccccgtcattcagtggttctggaaggctgtgctactcatggacgccgaaaagcgtatccggttactgcagtttgtcacagggacatcgcgagtacctatgaatggatttgccgaactttatggttccaatggtcctcagctgtttacaatagagcaatggggcagtcctgagaaactgcccagagctcacacatgctttaatcgccttgacttacctccatatgaaacctttgaagatttacgagagaaacttctcatggccgtggaaaatgctcaaggatttgaaggggtggattaagcaccctgtgcctcgggggtggttgttcttcaagcaagttctgcttgcacttttgcatttgcctaacagacttttgcagaggcgatggcagagagcagctgcaggcatggtccctggagccgagccttcaccacgcactcgtccaagttcggatgcgggaacctggtcccagcttgagttcctgcctttcccaccacaaattatcaactggttgatgtgtacactaattacatttcaggaggacttaatgctatttatgttgtgcctctgcaggcaaagcccttaataaatattttacatcctttctaatgacaatgaatggaattaatcactcaacaggtatagtattacgactcatgtttactttttaaaatgatttagaccgattttcagattttatttcgttatgattaaagatgtctcatgtacttggaaaagtgagcatttttttttttttttgtatttcactttcataccaggcttaatgtcaatgacatttttatttttgaagtactctgacacctccaccctctactttattagaattggaaggcaaatttttgtccaaaaacctacagacaagtactttgagagaatttccaatataatattagacataatgataattttttccatactcagaatgaaaaactggatattacgtttttgttttggggtttttttgtacaaatttagctaatagctacaggctgagagaattgtaacatagcatgacaaattttgtgttgacttgaaaggaatcacaccattattccttagaagtaattacatgtgttctaacacatttgagacagggttggactcccatttctcatccgagaaattacttaacccttcctggcgctgtacagtcatcttttattctatttcctctttgctgtttgtagtagagacattttgaatgaaacttggcactgcttgattcaaaactgtggaaaccagatctgtttagtctcctgtttgtatgcgtttgctaatggtagctaaataaccagtttttgttgtaaatgcaccaattctgaaggcactttatgtactacatggaggtcatatctggttttgtttttatttttttatcatgaacattaaatgtgatgatgatttcttttccctgcacacatctttccggtgcaatatctatcaattgtgaatctggctgctggtgtataaaaacctggatgtaaagctgagcctacagacctgtcctcaccaactgttttgtgatttctactcaactacaaagatttatttaatgtactcttaatctaactgagttttgttaccaatgacctgttgcatgcttcaataccgtgtactgcctgagttgtgcctcttgtgtgctagattaaaagtgagacagagacttgacttgatcctctgagctcaagctattgagctggtagtggcagaggactgagggtacctgcacagtttgattcttttccacgtgtaagtctccattgcagaattgtcgtgctttgagaaaacacctgaggcagtgtgggagttgaacgaccctgctgtcctttttaacctgtgttgtcctagaccctgtcggggcagtcaggggacactagagatttgatctcatgcgagtcatcaataggacaaaaaagttgtggtttggggaggtctgtttgttacataaaaaggacctttcggtgtaagaaattgccgtttttaccctgccctggctggcatgtgagaagccatggaaggttgtggttgtaaatgagttgtctaaaggggtgcagaggcctgaggtttctaaaagaaggtagatttctacagagctgagtgttggttcctttttcttattggttgaaaattacctggtagtgatcagaaaacttagatgctatgtaactaaaaaaaaaaaaaaaaaaaaaaaaaaaaaaaaaaaaattcccgctcatgagttttgactattggtgagatgttttccgctacagttaacatgacaaatgtctcagtggcaaaaatcccctttttgtaagcccccatagtctagaggcagttttctttttaagaatcatgccagagcctgagtcgagcagtatgctttcttggtttttgagagtaattgtgtaattgtagagggagaaatccaattctaacctaagaactgggattcttctgtcatcttgtaaaccgtatattgaaaaaaacagaatgtcactaaatgcatattaagtcaagtattggaaagtataaaagaaaaatcattctgacaatttctaagccagaagcaaacaagaattactgaaatctaccccatgaatacttggaaggcagtaattgtgagtgacacctcagttcatcaaccccttaataatatcagcttaattttaatgacaactaaatatgctgaagtgaggatttagtattttttaaaaaagcaaaacaaggttcagtagtcctcagcaattctccaagtttctctctttgcctaaaatggtcatagatcttgatttctctgaatcgtgatgaccacacccagtcatcttcacagcataattgcaggtggcagtaaagagagtgtgctgggtaaggagcagttgctgggtcattccttgggccccgacctgcccggggagtagccctgggggagagagggcagtgttgcctatcccagaggtcccagcagtcacactgctctgcaggccgggctctctttatagccagagaaatcaccttaatgcagtctctttagttgtctgctgaagctgtagttattatgggccacttacatgaggctgagaagtacgtgccggagctcacacactgcctgttgcggttctcttaacatcagttatcacagctgcctgtgggtcccgggtatttccattcctgccccttgttggcccgaggaaggatgtggaaagagcacctggtgggatgaaggtccaacagcctgtgcctctccactgctggccctggagccggcagcagtgaggcattcattgtctgtgttgcggtgtattcccagcttcagtgctcttttcctttttgcctgaaatgtttatgcttctctgcagccagtcctctaacaaatctcaagaacaaaggtaagacacttggtttttgtttccaggacccttcagaaggtgacatcagatattccctaaattcagacaatgagggatacagagcgacttggcatgtattatttctcccatgtaaggacaaagggacagattattattgttatttctgagacagagtcttgctctgtagctcaggctggagtgcagtggctcaatctcagctcaccacaacctctgcctcctggcttcaagcgattcttctgcctcagcctccccgaatagttgggattacaggcacccaccaccacgcctggctaatttttgtatttttagtagagatggtttcaccatgctggccaggctggtcttgaactcctgacctcaggtgatcctcccgcctcagccttccaaagtgctgggattacaagcatgagccaccgcacccggcctcacagtgacagattctgagaaacagcatgcaaaacatttgaaccattttctacatctcccattgttgcatagagagtgtgcaccgctgctatcttgccagatccacactggtcctcccgaaagccaggttcatacacagcaactttttaattattctaacagttacccattaacagtcgactcctgtatttctgagagtcttgtactcacctctgaaatttaaaaacgtataaagagagcctgggttaatcagttctgcagcccctacgtgacactgtgctagttctccttcttctgtctcctccttaccctggccctgcacccctgtacttaagagggagaggtgggaggtgctgtctggtatcatttgctgcctcgccagtagagggtgccgctgtgcagggtaactgcccgcctgctcccttcctgacctcccctgaccccgaagatcactacctctgtcattcaggcattggggtacatcctgataagtcgtgtcagaactgccaatttcaggactgagatgtgtttttaaaaaacaaatccttataaactccactttgtactttagattttaaaactggggaaaaatgtgatattctttggaccacttttttaatttatataagccttaatgaacagtgtctatacatttgcatacacacacccccaccccagagtgttctcagtatgtcagagaaagtgccacagcattaggacgggagcttggagaacgttttctagaaaagggttagcttcctgttggcatgaaattttccaagcaaacctcattaaacatctgttgtttgttaaagatgttccactgaaagcaacgcatgtttcaaaggcacgtctttccgttcgttggttttctgtgtgtaaggagtagcattgctgttggcgcctaacctcgcgtgcactgcattctcaaccccgtaccagtgcatcatcagaagccttcctcgtgaccataactctgtgtctgcagatatgtgttcccgtgtaagccagttttccccttttactcagactgatttcacctagattgtcacggtttccttcatgttaactttgcgtgactttgttcttcctttactactctgtatgtaatatatatacatatatacgtacatatgctgtccaaatatatttgtatatatttgtatagcatttttacacctttattgagtaatctggtttcgaaaggaggtgagagtttagtcccttctgcagttttctccaagctgtgtcctgtgaatttcaacccttggagcctaagaaaaccctaggaagatgatgttaatttgctgtcatttcctaattcaggatctatcatcaaatgaaacatgaaaaaaacagtgacttttaaggtgaaaagagtttcaagcattccaaataaattatcaatgtttcataactttttattataaacccacctcctaataggaagccaagtactatttgatacagtggtaaaaaccaaactaccttgaatttttttaaggcaacttatgaataatgctcattttcacagtcagaatagctttaaaatatggttgaatttgatacacacaggaagttttcttgaagaacaatcctttcgcttttcttttttcttgagagatctaaagagaaactgtagattgttttcctgacagcaaaagactaatgtgacaaaatgaagtcattgtaaagaagcgatgcaacttgtcaaatatttaataaagaattatggaagctggaacattttctacatca

SEQ ID NO: 352 - protein, 826 aa, Homo sapiens
MERPYTFKDFLLRPRSHKSRVKGFLRLKMAYMPKNGGQDEENSDQRDDMEHGWEVVDSNDSASQHQEELPPPPLPPGWEEKVDNLGRTYYVNHNNRTTQWHRPSLMDVSSESDNNIRQINQEAAHRRFRSRRHEDLEPEPSEGGDVPEPWETISEEVNIAGDSLGLALPPPPDGSRTSPQELSEELSRRLQITPDSNGEQFSSLIQREPSSRLRSCSVTDAVAEQGHLPPPSVAYVHTTPGLPSGWEERKDAKGRTYYVNHNNRTTTWWIMQLAEDGASGSATNSNNHLIEPQIRRPRSLSSPTVTLSAPLEGAKDSPVRRAVKDTLSNPQSPQPSPYNSPKPQHKVTQSFLPPGWEMRIAPNGRPFFIDHNTKTTTWEDPRLKFPVHMRSKTSLNPNDLGPLPPGWEERIHLDGRTFYIDHNSKITQWEDPRLQNPAITGPAVPYSREFKQKYDYFRKKLKKPADIPNRFEMKLHRNNIFEESYRRIMSVKRPDVLKARLWIEFESEKGLDYGGVAREWFFLLSKEMFNPYYGLFEYSATDNYTLQINPNSGLCNEDHLSYFTFIGRVAGLAVFHGKLLDGFFIRPFYKMMLGKQITLNDMESVDSEYYNSLKWINDPTELDLMFCIDEENFGQTYQVDLKPNGSEIMVTNENKREYIDLVIQWRFVNRVQKQMNAFLEGFTELLPIDLIKIFDENELELLMCGLGDVDVNDWRQHSIYKNGYCPNHPVIQWFWKAVLLMDAEKRIRLLQFVTGTSRVPMNGFAELYGSNGPQLFTIEQWGSPEKLPRAHTCFNRLDLPPYETFEDLREKLLMAVENAQGFEGVD

SEQ ID NO: 353 - DNA, 3499 bp, Homo sapiens
cctctttttttgttctccttctcacagggagagtcccgtattctcagagtaaaagttgtttctggaattgatctcgccaaaaaggacatctttggagccagtgatccgtatgtgaaactttcattgtacgtagcggatgagaatagagaacttgctttggtccagacaaaaacaattaaaaagacactgaacccaaaatggaatgaagaattttatttcagggtaaacccatctaatcacagactcctatttgaagtatttgacgaaaatagactgacacgagacgacttcctgggccaggtggacgtgccccttagtcaccttccgacagaagatccaaccatggagcgaccctatacatttaaggactttctcctcagaccaagaagtcataagtctcgagttaagggatttttgcgattgaaaatggcctatatgccaaaaaatggaggtcaagatgaagaaaacagtgaccagagggatgacatggagcatggatgggaagttgttgactcaaatgactcggcttctcagcaccaagaggaacttcctcctcctcctctgcctcccgggtgggaagaaaaagtggacaatttaggccgaacttactatgtcaaccacaacaaccggaccactcagtggcacagaccaagcctgatggacgtgtcctcggagtcggacaataacatcagacagatcaaccaggaggcagcacaccggcgcttccgctcccgcaggcacatcagcgaagacttggagcccgagccctcggagggcggggatgtccccgagccttgggagaccatttcagaggaagtgaatatcgctggagactctctcggtctggctctgcccccaccaccggcctccccaggatctcggaccagccctcaggagctgtcagaggaactaagcagaaggcttcagatcactccagactccaatggggaacagttcagctctttgattcaaagagaaccctcctcaaggttgaggtcatgcagtgtcaccgacgcagttgcagaacagggccatctaccaccgccatcagtggcctatgtacataccacgccgggtctgccttcaggctgggaagaaagaaaagatgctaaggggcgcacatactatgtcaatcataacaatcgaaccacaacttggactcgacctatcatgcagcttgcagaagatggtgcgtccggatcagccacaaacagtaacaaccatctaatcgagcctcagatccgccggcctcgtagcctcagctcgccaacagtaactttatctgccccgctggagggtgccaaggactcacccgtacgtcgggctgtgaaagacaccctttccaacccacagtccccacagccatcaccttacaactcccccaaaccacaacacaaagtcacacagagcttcttgccacccggctgggaaatgaggatagcgccaaacggccggcccttcttcattgatcataacacaaagactacaacctgggaagatccacgtttgaaatttccagtacatatgcggtcaaagacatctttaaaccccaatgaccttggcccccttcctcctggctgggaagaaagaattcacttggatggccgaacgttttatattgatcataatagcaaaattactcagtgggaagacccaagactgcagaacccagctattactggtccggctgtcccttactccagagaatttaagcagaaatatgactacttcaggaagaaattaaagaaacctgctgatatccccaataggtttgaaatgaaacttcacagaaataacatatttgaagagtcctatcggagaattatgtccgtgaaaagaccagatgtcctaaaagctagactgtggattgagtttgaatcagagaaaggtcttgactatgggggtgtggccagagaatggttcttcttactgtccaaagagatgttcaacccctactacggcctctttgagtactctgccacggacaactacacccttcagatcaaccctaattcaggcctctgtaatgaggatcatttgtcctacttcacttttattggaagagttgctggtctggccgtatttcatgggaagctcttagatggtttcttcattagaccattttacaagatgatgttgggaaagcagataaccctgaatgacatggaatctgtggatagtgaatattacaactctttgaaatggatcctggagaatgaccctactgagctggacctcatgttctgcatagacgaagaaaactttggacagacatatcaagtggatttgaagcccaatgggtcagaaataatggtcacaaatgaaaacaaaagggaatatatcgacttagtcatccagtggagatttgtgaacagggtccagaagcagatgaacgccttcttggagggattcacagaactacttcctattgatttgattaaaatttttgatgaaaatgagctggagttgctcatgtgcggcctcggtgatgtggatgtgaatgactggagacagcattctatttacaagaacggctactgcccaaaccaccccgtcattcagtggttctggaaggctgtgctactcatggacgccgaaaagcgtatccggttactgcagtttgtcacagggacatcgcgagtacctatgaatggatttgccgaactttatggttccaatggtcctcagctgtttacaatagagcaatggggcagtcctgagaaactgcccagagctcacacatgctttaatcgccttgacttacctccatatgaaacctttgaagatttacgagagaaacttctcatggccgtggaaaatgctcaaggatttgaaggggtggattaagcaccctgtgcctcgggggtggttgttcttcaagcaagttctgcttgcacttttgcatttgcctaacagacttttgcagaggcgatggcagagagcagctgcaggcatggtccctggagccgagccttcaccacgcactcgtccaagttcggatgcgggaacctggtcccagcttgagttcctgcctttcccaccacaaattatcaactggttgatgtgtacactaattacatttcaggaggacttaatgctatttatgttgtgcctctgcaggcaaagcccttaataaatattttacatcctttctaatgacaatgaatggaattaatcactcaacaggtatagtattacgactcatgtttactttttaaaatgatttagaccgattttcagattttatttcgttatgattaaagatgtctcatgtacttggaaaagtgagcatttttttttttttttttttttgtacaaatttagctaatagctacaggctgagagaattgtaacatagcatgacaaattttgtgttgacttgaaaggaatcacaccattggactcccatttctcatccgagaaattacttaacccttcctggcgctgtacagtcatcttttattctatttcctctttgctgtttgtagtagagacattt

SEQ ID NO: 354 - protein, 826 aa, Homo sapiens; identical to SEQ ID NO: 352

SEQ ID NO: 355 - DNA, 8434 bp, Homo sapiens
cgccgccgcgcgcagggagaggcgccggggctgccgcccggtgctcggcgcgctctcgggagccgcccgcccgctggtcccgcagccttccgggaggaagcggtgccggcagcgtccagggcgcgctctcgggcaccctcacctgccggcgcccggccgcttacccggcagggcgtgcgcagggtagggtgcgggaccggggggacctggaggcagaggggagaaccggccgtccgcgccgcagcacagccgctgggagcgcctcagaccccgcgcggggcgccggctccatggcgaccgggctcggggagccggtctatggactttccgaagacgagggagagtcccgtattctcagagtaaaagttgtttctggaattgatctcgccaaaaaggacatctttggagccagtgatccgtatgtgaaactttcattgtacgtagcggatgagaatagagaacttgctttggtccagacaaaaacaattaaaaagacactgaacccaaaatggaatgaagaattttatttcagggtaaacccatctaatcacagactcctatttgaagtatttgacgaaaatagactgacacgagacgacttcctgggccaggtggacgtgccccttagtcaccttccgacagaagatccaaccatggagcgaccctatacatttaaggactttctcctcagaccaagaagtcataagtctcgagttaagggatttttgcgattgaaaatggcctatatgccaaaaaatggaggtcaagatgaagaaaacagtgaccagagggatgacatggagcatggatgggaagttgttgactcaaatgactcggcttctcagcaccaagaggaacttcctcctcctcctctgcctcccgggtgggaagaaaaagtggacaatttaggccgaacttactatgtcaaccacaacaaccggaccactcagtggcacagaccaagcctgatggacgtgtcctcggagtcggacaataacatcagacagatcaaccaggaggcagcacaccggcgcttccgctcccgcaggcacatcagcgaagacttggagcccgagccctcggagggcggggatgtccccgagccttgggagaccatttcagaggaagtgaatatcgctggagactctctcggtctggctctgcccccaccaccggcctccccaggatctcggaccagccctcaggagctgtcagaggaactaagcagaaggcttcagatcactccagactccaatggggaacagttcagctctttgattcaaagagaaccctcctcaaggttgaggtcatgcagtgtcaccgacgcagttgcagaacagggccatctaccaccgccatcagtggcctatgtacataccacgccgggtctgccttcaggctgggaagaaagaaaagatgctaaggggcgcacatactatgtcaatcataacaatcgaaccacaacttggactcgacctatcatgcagcttgcagaagatggtgcgtccggatcagccacaaacagtaacaaccatctaatcgagcctcagatccgccggcctcgtagcctcagctcgccaacagtaactttatctgccccgctggagggtgccaaggactcacccgtacgtcgggctgtgaaagacaccctttccaacccacagtccccacagccatcaccttacaactcccccaaaccacaacacaaagtcacacagagcttcttgccacccggctgggaaatgaggatagcgccaaacggccggcccttcttcattgatcataacacaaagactacaacctgggaagatccacgtttgaaatttccagtacatatgcggtcaaagacatctttaaaccccaatgaccttggcccccttcctcctggctgggaagaaagaattcacttggatggccgaacgttttatattgatcataatagcaaaattactcagtgggaagacccaagactgcagaacccagctattactggtccggctgtcccttactccagagaatttaagcagaaatatgactacttcaggaagaaattaaagaaacctgctgatatccccaataggtttgaaatgaaacttcacagaaataacatatttgaagagtcctatcggagaattatgtccgtgaaaagaccagatgtcctaaaagctagactgtggattgagtttgaatcagagaaaggtcttgactatgggggtgtggccagagaatggttcttcttactgtccaaagagatgttcaacccctactacggcctctttgagtactctgccacggacaactacacccttcagatcaaccctaattcaggcctctgtaatgaggatcatttgtcctacttcacttttattggaagagttgctggtctggccgtatttcatgggaagctcttagatggtttcttcattagaccattttacaagatgatgttgggaaagcagataaccctgaatgacatggaatctgtggatagtgaatattacaactctttgaaatggatcctggagaatgaccctactgagctggacctcatgttctgcatagacgaagaaaactttggacagacatatcaagtggatttgaagcccaatgggtcagaaataatggtcacaaatgaaaacaaaagggaatatatcgacttagtcatccagtggagatttgtgaacagggtccagaagcagatgaacgccttcttggagggattcacagaactacttcctattgatttgattaaaatttttgatgaaaatgagctggagttgctcatgtgcggcctcggtgatgtggatgtgaatgactggagacagcattctatttacaagaacggctactgcccaaaccaccccgtcattcagtggttctggaaggctgtgctactcatggacgccgaaaagcgtatccggttactgcagtttgtcacagggacatcgcgagtacctatgaatggatttgccgaactttatggttccaatggtcctcagctgtttacaatagagcaatggggcagtcctgagaaactgcccagagctcacacatgctttaatcgccttgacttacctccatatgaaacctttgaagatttacgagagaaacttctcatggccgtggaaaatgctcaaggatttgaaggggtggattaagcaccctgtgcctcgggggtggttgttcttcaagcaagttctgcttgcacttttgcatttgcctaacagacttttgcagaggcgatggcagagagcagctgcaggcatggtccctggagccgagccttcaccacgcactcgtccaagttcggatgcgggaacctggtcccagcttgagttcctgcctttcccaccacaaattatcaactggttgatgtgtacactaattacatttcaggaggacttaatgctatttatgttgtgcctctgcaggcaaagcccttaataaatattttacatcctttctaatgacaatgaatggaattaatcactcaacaggtatagtattacgactcatgtttactttttaaaatgatttagaccgattttcagattttatttcgttatgattaaagatgtctcatgtacttggaaaagtgagcatttttttttttttttgtatttcactttcataccaggcttaatgtcaatgacatttttatttttgaagtactctgacacctccaccctctactttattagaattggaaggcaaatttttgtccaaaaacctacagacaagtactttgagagaatttccaatataatattagacataatgataattttttccatactcagaatgaaaaactggatattacgtttttgttttggggtttttttgtacaaatttagctaatagctacaggctgagagaattgtaacatagcatgacaaattttgtgttgacttgaaaggaatcacaccattattccttagaagtaattacatgtgttctaacacatttgagacagggttggactcccatttctcatccgagaaattacttaacccttcctggcgctgtacagtcatcttttattctatttcctctttgctgtttgtagtagagacattttgaatgaaacttggcactgcttgattcaaaactgtggaaaccagatctgtttagtctcctgtttgtatgcgtttgctaatggtagctaaataaccagtttttgttgtaaatgcaccaattctgaaggcactttatgtactacatggaggtcatatctggttttgtttttatttttttatcatgaacattaaatgtgatgatgatttcttttccctgcacacatctttccggtgcaatatctatcaattgtgaatctggctgctggtgtataaaaacctggatgtaaagctgagcctacagacctgtcctcaccaactgttttgtgatttctactcaactacaaagatttatttaatgtactcttaatctaactgagttttgttaccaatgacctgttgcatgcttcaataccgtgtactgcctgagttgtgcctcttgtgtgctagattaaaagtgagacagagacttgacttgatcctctgagctcaagctattgagctggtagtggcagaggactgagggtacctgcacagtttgattcttttccacgtgtaagtctccattgcagaattgtcgtgctttgagaaaacacctgaggcagtgtgggagttgaacgaccctgctgtcctttttaacctgtgttgtcctagaccctgtcggggcagtcaggggacactagagatttgatctcatgcgagtcatcaataggacaaaaaagttgtggtttggggaggtctgtttgttacataaaaaggacctttcggtgtaagaaattgccgtttttaccctgccctggctggcatgtgagaagccatggaaggttgtggttgtaaatgagttgtctaaaggggtgcagaggcctgaggtttctaaaagaaggtagatttctacagagctgagtgttggttcctttttcttattggttgaaaattacctggtagtgatcagaaaacttagatgctatgtaactaaaaaaaaaaaaaaaaaaaaaaaaaaaaaaaaaaaaattcccgctcatgagttttgactattggtgagatgttttccgctacagttaacatgacaaatgtctcagtggcaaaaatcccctttttgtaagcccccatagtctagaggcagttttctttttaagaatcatgccagagcctgagtcgagcagtatgctttcttggtttttgagagtaattgtgtaattgtagagggagaaatccaattctaacctaagaactgggattcttctgtcatcttgtaaaccgtatattgaaaaaaacagaatgtcactaaatgcatattaagtcaagtattggaaagtataaaagaaaaatcattctgacaatttctaagccagaagcaaacaagaattactgaaatctaccccatgaatacttggaaggcagtaattgtgagtgacacctcagttcatcaaccccttaataatatcagcttaattttaatgacaactaaatatgctgaagtgaggatttagtattttttaaaaaagcaaaacaaggttcagtagtcctcagcaattctccaagtttctctctttgcctaaaatggtcatagatcttgatttctctgaatcgtgatgaccacacccagtcatcttcacagcataattgcaggtggcagtaaagagagtgtgctgggtaaggagcagttgctgggtcattccttgggccccgacctgcccggggagtagccctgggggagagagggcagtgttgcctatcccagaggtcccagcagtcacactgctctgcaggccgggctctctttatagccagagaaatcaccttaatgcagtctctttagttgtctgctgaagctgtagttattatgggccacttacatgaggctgagaagtacgtgccggagctcacacactgcctgttgcggttctcttaacatcagttatcacagctgcctgtgggtcccgggtatttccattcctgccccttgttggcccgaggaaggatgtggaaagagcacctggtgggatgaaggtccaacagcctgtgcctctccactgctggccctggagccggcagcagtgaggcattcattgtctgtgttgcggtgtattcccagcttcagtgctcttttcctttttgcctgaaatgtttatgcttctctgcagccagtcctctaacaaatctcaagaacaaaggtaagacacttggtttttgtttccaggacccttcagaaggtgacatcagatattccctaaattcagacaatgagggatacagagcgacttggcatgtattatttctcccatgtaaggacaaagggacagattattattgttatttctgagacagagtcttgctctgtagctcaggctggagtgcagtggctcaatctcagctcaccacaacctctgcctcctggcttcaagcgattcttctgcctcagcctccccgaatagttgggattacaggcacccaccaccacgcctggctaatttttgtatttttagtagagatggtttcaccatgctggccaggctggtcttgaactcctgacctcaggtgatcctcccgcctcagccttccaaagtgctgggattacaagcatgagccaccgcacccggcctcacagtgacagattctgagaaacagcatgcaaaacatttgaaccattttctacatctcccattgttgcatagagagtgtgcaccgctgctatcttgccagatccacactggtcctcccgaaagccaggttcatacacagcaactttttaattattctaacagttacccattaacagtcgactcctgtatttctgagagtcttgtactcacctctgaaatttaaaaacgtataaagagagcctgggttaatcagttctgcagcccctacgtgacactgtgctagttctccttcttctgtctcctccttaccctggccctgcacccctgtacttaagagggagaggtgggaggtgctgtctggtatcatttgctgcctcgccagtagagggtgccgctgtgcagggtaactgcccgcctgctcccttcctgacctcccctgaccccgaagatcactacctctgtcattcaggcattggggtacatcctgataagtcgtgtcagaactgccaatttcaggactgagatgtgtttttaaaaaacaaatccttataaactccactttgtactttagattttaaaactggggaaaaatgtgatattctttggaccacttttttaatttatataagccttaatgaacagtgtctatacatttgcatacacacacccccaccccagagtgttctcagtatgtcagagaaagtgccacagcattaggacgggagcttggagaacgttttctagaaaagggttagcttcctgttggcatgaaattttccaagcaaacctcattaaacatctgttgtttgttaaagatgttccactgaaagcaacgcatgtttcaaaggcacgtctttccgttcgttggttttctgtgtgtaaggagtagcattgctgttggcgcctaacctcgcgtgcactgcattctcaaccccgtaccagtgcatcatcagaagccttcctcgtgaccataactctgtgtctgcagatatgtgttcccgtgtaagccagttttccccttttactcagactgatttcacctagattgtcacggtttccttcatgttaactttgcgtgactttgttcttcctttactactctgtatgtaatatatatacatatatacgtacatatgctgtccaaatatatttgtatatatttgtatagcatttttacacctttattgagtaatctggtttcgaaaggaggtgagagtttagtcccttctgcagttttctccaagctgtgtcctgtgaatttcaacccttggagcctaagaaaaccctaggaagatgatgttaatttgctgtcatttcctaattcaggatctatcatcaaatgaaacatgaaaaaaacagtgacttttaaggtgaaaagagtttcaagcattccaaataaattatcaatgtttcataactttttattataaacccacctcctaataggaagccaagtactatttgatacagtggtaaaaaccaaactaccttgaatttttttaaggcaacttatgaataatgctcattttcacagtcagaatagctttaaaatatggttgaatttgatacacacaggaagttttcttgaagaacaatcctttcgcttttcttttttcttgagagatctaaagagaaactgtagattgttttcctgacagcaaaagactaatgtgacaaaatgaagtcattgtaaagaagcgatgcaacttgtcaaatatttaataaagaattatggaagctggaacattttctacatca

SEQ ID NO: 356 - protein, 947 aa, Homo sapiens
MATGLGEPVYGLSEDEGESRILRVKVVSGIDLAKKDIFGASDPYVKLSLYVADENRELALVQTKTIKKTLNPKWNEEFYFRVNPSNHRLLFEVFDENRLTRDDFLGQVDVPLSHLPTEDPTMERPYTFKDFLLRPRSHKSRVKGFLRLKMAYMPKNGGQDEENSDQRDDMEHGWEVVDSNDSASQHQEELPPPPLPPGWEEKVDNLGRTYYVNHNNRTTQWHRPSLMDVSSESDNNIRQINQEAAHRRFRSRRHEDLEPEPSEGGDVPEPWETISEEVNIAGDSLGLALPPPPDGSRTSPQELSEELSRRLQITPDSNGEQFSSLIQREPSSRLRSCSVTDAVAEQGHLPPPSVAYVHTTPGLPSGWEERKDAKGRTYYVNHNNRTTTWWIMQLAEDGASGSATNSNNHLIEPQIRRPRSLSSPTVTLSAPLEGAKDSPVRRAVKDTLSNPQSPQPSPYNSPKPQHKVTQSFLPPGWEMRIAPNGRPFFIDHNTKTTTWEDPRLKFPVHMRSKTSLNPNDLGPLPPGWEERIHLDGRTFYIDHNSKITQWEDPRLQNPAITGPAVPYSREFKQKYDYFRKKLKKPADIPNRFEMKLHRNNIFEESYRRIMSVKRPDVLKARLWIEFESEKGLDYGGVAREWFFLLSKEMFNPYYGLFEYSATDNYTLQINPNSGLCNEDHLSYFTFIGRVAGLAVFHGKLLDGFFIRPFYKMMLGKQITLNDMESVDSEYYNSLKWINDPTELDLMFCIDEENFGQTYQVDLKPNGSEIMVTNENKREYIDLVIQWRFVNRVQKQMNAFLEGFTELLPIDLIKIFDENELELLMCGLGDVDVNDWRQHSIYKNGYCPNHPVIQWFWKAVLLMDAEKRIRLLQFVTGTSRVPMNGFAELYGSNGPQLFTIEQWGSPEKLPRAHTCFNRLDLPPYETFEDLREKLLMAVENAQGFEGVD

SEQ ID NO: 357 - DNA, 8064 bp, Homo sapiens
ccagtcacagaggaagccatttccagagaggaacaaccgtgtagactgctttcctgggagtcaagttaaaacttctctcctgtgaccttgtcacccggcagtggaaagttacccttggctgcagccacgacttccgcatactcttcagaacttgctctgcccttgagttttccagctttcctttaatgcactaaacctttaatattgtattctcctaaatgagacgtctcgcatttgagcaggtaacactcgggagagtcccgtattctcagagtaaaagttgtttctggaattgatctcgccaaaaaggacatctttggagccagcggatgagaatagagaacttgctttggtccagacaaaaacaattaaaaagacactgaacccaaaatggaatgaagaattttatttcagggtaaacccatctaatcacagactcctatttgaagtatttgacgaaaatagactgacacgagacgacttcctgggccaggtggacgtgccccttagtcaccttccgacagaagatccaaccatggagcgaccctatacatttaaggactttctcctcagaccaagaagtcataagtctcgagttaagggatttttgcgattgaaaatggcctatatgccaaaaaatggaggtcaagatgaagaaaacagtgaccagagggatgacatggagcatggatgggaagttgttgactcaaatgactcggcttctcagcaccaagaggaacttcctcctcctcctctgcctcccgggtgggaagaaaaagtggacaatttaggccgaacttactatgtcaaccacaacaaccggaccactcagtggcacagaccaagcctgatggacgtgtcctcggagtcggacaataacatcagacagatcaaccaggaggcagcacaccggcgcttccgctcccgcaggcacatcagcgaagacttggagcccgagccctcggagggcggggatgtccccgagccttgggagaccatttcagaggaagtgaatatcgctggagactctctcggtctggctctgcccccaccaccggcctccccaggatctcggaccagccctcaggagctgtcagaggaactaagcagaaggcttcagatcactccagactccaatggggaacagttcagctctttgattcaaagagaaccctcctcaaggttgaggtcatgcagtgtcaccgacgcagttgcagaacagggccatctaccaccgggtgccaaggactcacccgtacgtcgggctgtgaaagacaccctttccaacccacagtccccacagccatcaccttacaactcccccaaaccacaacacaaagtcacacagagcttcttgccacccggctgggaaatgaggatagcgccaaacggccggcccttcttcattgatcataacacaaagactacaacctgggaagatccacgtttgaaatttccagtacatatgcggtcaaagacatctttaaaccccaatgaccttggcccccttcctcctggctgggaagaaagaattcacttggatggccgaacgttttatattgatcataatagcaaaattactcagtgggaagacccaagactgcagaacccagctattactggtccggctgtcccttactccagagaatttaagcagaaatatgactacttcaggaagaaattaaagaaacctgctgatatccccaataggtttgaaatgaaacttcacagaaataacatatttgaagagtcctatcggagaattatgtccgtgaaaagaccagatgtcctaaaagctagactgtggattgagtttgaatcagagaaaggtcttgactatgggggtgtggccagagaatggttcttcttactgtccaaagagatgttcaacccctactacggcctctttgagtactctgccacggacaactacacccttcagatcaaccctaattcaggcctctgtaatgaggatcatttgtcctacttcacttttattggaagagttgctggtctggccgtatttcatgggaagctcttagatggtttcttcattagaccattttacaagatgatgttgggaaagcagataaccctgaatgacatggaatctgtggatagtgaatattacaactctttgaaatggatcctggagaatgaccctactgagctggacctcatgttctgcatagacgaagaaaactttggacagacatatcaagtggatttgaagcccaatgggtcagaaataatggtcacaaatgaaaacaaaagggaatatatcgacttagtcatccagtggagatttgtgaacagggtccagaagcagatgaacgccttcttggagggattcacagaactacttcctattgatttgattaaaatttttgatgaaaatgagctggagttgctcatgtgcggcctcggtgatgtggatgtgaatgactggagacagcattctatttacaagaacggctactgcccaaaccaccccgtcattcagtggttctggaaggctgtgctactcatggacgccgaaaagcgtatccggttactgcagtttgtcacagggacatcgcgagtacctatgaatggatttgccgaactttatggttccaatggtcctcagctgtttacaatagagcaatggggcagtcctgagaaactgcccagagctcacacatgctttaatcgccttgacttacctccatatgaaacctttgaagatttacgagagaaacttctcatggccgtggaaaatgctcaaggatttgaaggggtggattaagcaccctgtgcctcgggggtggttgttcttcaagcaagttctgcttgcacttttgcatttgcctaacagacttttgcagaggcgatggcagagagcagctgcaggcatggtccctggagccgagccttcaccacgcactcgtccaagttcggatgcgggaacctggtcccagcttgagttcctgcctttcccaccacaaattatcaactggttgatgtgtacactaattacatttcaggaggacttaatgctatttatgttgtgcctctgcaggcaaagcccttaataaatattttacatcctttctaatgacaatgaatggaattaatcactcaacaggtatagtattacgactcatgtttactttttaaaatgatttagaccgattttcagattttatttcgttatgattaaagatgtctcatgtacttggaaaagtgagcatttttttttttttttgtatttcactttcataccaggcttaatgtcaatgacatttttatttttgaagtactctgacacctccaccctctactttattagaattggaaggcaaatttttgtccaaaaacctacagacaagtactttgagagaatttccaatataatattagacataatgataattttttccatactcagaatgaaaaactggatattacgtttttgttttggggtttttttgtacaaatttagctaatagctacaggctgagagaattgtaacatagcatgacaaattttgtgttgacttgaaaggaatcacaccattattccttagaagtaattacatgtgttctaacacatttgagacagggttggactcccatttctcatccgagaaattacttaacccttcctggcgctgtacagtcatcttttattctatttcctctttgctgtttgtagtagagacattttgaatgaaacttggcactgcttgattcaaaactgtggaaaccagatctgtttagtctcctgtttgtatgcgtttgctaatggtagctaaataaccagtttttgttgtaaatgcaccaattctgaaggcactttatgtactacatggaggtcatatctggttttgtttttatttttttatcatgaacattaaatgtgatgatgatttcttttccctgcacacatctttccggtgcaatatctatcaattgtgaatctggctgctggtgtataaaaacctggatgtaaagctgagcctacagacctgtcctcaccaactgttttgtgatttctactcaactacaaagatttatttaatgtactcttaatctaactgagttttgttaccaatgacctgttgcatgcttcaataccgtgtactgcctgagttgtgcctcttgtgtgctagattaaaagtgagacagagacttgacttgatcctctgagctcaagctattgagctggtagtggcagaggactgagggtacctgcacagtttgattcttttccacgtgtaagtctccattgcagaattgtcgtgctttgagaaaacacctgaggcagtgtgggagttgaacgaccctgctgtcctttttaacctgtgttgtcctagaccctgtcggggcagtcaggggacactagagatttgatctcatgcgagtcatcaataggacaaaaaagttgtggtttggggaggtctgtttgttacataaaaaggacctttcggtgtaagaaattgccgtttttaccctgccctggctggcatgtgagaagccatggaaggttgtggttgtaaatgagttgtctaaaggggtgcagaggcctgaggtttctaaaagaaggtagatttctacagagctgagtgttggttcctttttcttattggttgaaaattacctggtagtgatcagaaaacttagatgctatgtaactaaaaaaaaaaaaaaaaaaaaaaaaaaaaaaaaaaaaattcccgctcatgagttttgactattggtgagatgttttccgctacagttaacatgacaaatgtctcagtggcaaaaatcccctttttgtaagcccccatagtctagaggcagttttctttttaagaatcatgccagagcctgagtcgagcagtatgctttcttggtttttgagagtaattgtgtaattgtagagggagaaatccaattctaacctaagaactgggattcttctgtcatcttgtaaaccgtatattgaaaaaaacagaatgtcactaaatgcatattaagtcaagtattggaaagtataaaagaaaaatcattctgacaatttctaagccagaagcaaacaagaattactgaaatctaccccatgaatacttggaaggcagtaattgtgagtgacacctcagttcatcaaccccttaataatatcagcttaattttaatgacaactaaatatgctgaagtgaggatttagtattttttaaaaaagcaaaacaaggttcagtagtcctcagcaattctccaagtttctctctttgcctaaaatggtcatagatcttgatttctctgaatcgtgatgaccacacccagtcatcttcacagcataattgcaggtggcagtaaagagagtgtgctgggtaaggagcagttgctgggtcattccttgggccccgacctgcccggggagtagccctgggggagagagggcagtgttgcctatcccagaggtcccagcagtcacactgctctgcaggccgggctctctttatagccagagaaatcaccttaatgcagtctctttagttgtctgctgaagctgtagttattatgggccacttacatgaggctgagaagtacgtgccggagctcacacactgcctgttgcggttctcttaacatcagttatcacagctgcctgtgggtcccgggtatttccattcctgccccttgttggcccgaggaaggatgtggaaagagcacctggtgggatgaaggtccaacagcctgtgcctctccactgctggccctggagccggcagcagtgaggcattcattgtctgtgttgcggtgtattcccagcttcagtgctcttttcctttttgcctgaaatgtttatgcttctctgcagccagtcctctaacaaatctcaagaacaaaggtaagacacttggtttttgtttccaggacccttcagaaggtgacatcagatattccctaaattcagacaatgagggatacagagcgacttggcatgtattatttctcccatgtaaggacaaagggacagattattattgttatttctgagacagagtcttgctctgtagctcaggctggagtgcagtggctcaatctcagctcaccacaacctctgcctcctggcttcaagcgattcttctgcctcagcctccccgaatagttgggattacaggcacccaccaccacgcctggctaatttttgtatttttagtagagatggtttcaccatgctggccaggctggtcttgaactcctgacctcaggtgatcctcccgcctcagccttccaaagtgctgggattacaagcatgagccaccgcacccggcctcacagtgacagattctgagaaacagcatgcaaaacatttgaaccattttctacatctcccattgttgcatagagagtgtgcaccgctgctatcttgccagatccacactggtcctcccgaaagccaggttcatacacagcaactttttaattattctaacagttacccattaacagtcgactcctgtatttctgagagtcttgtactcacctctgaaatttaaaaacgtataaagagagcctgggttaatcagttctgcagcccctacgtgacactgtgctagttctccttcttctgtctcctccttaccctggccctgcacccctgtacttaagagggagaggtgggaggtgctgtctggtatcatttgctgcctcgccagtagagggtgccgctgtgcagggtaactgcccgcctgctcccttcctgacctcccctgaccccgaagatcactacctctgtcattcaggcattggggtacatcctgataagtcgtgtcagaactgccaatttcaggactgagatgtgtttttaaaaaacaaatccttataaactccactttgtactttagattttaaaactggggaaaaatgtgatattctttggaccacttttttaatttatataagccttaatgaacagtgtctatacatttgcatacacacacccccaccccagagtgttctcagtatgtcagagaaagtgccacagcattaggacgggagcttggagaacgttttctagaaaagggttagcttcctgttggcatgaaattttccaagcaaacctcattaaacatctgttgtttgttaaagatgttccactgaaagcaacgcatgtttcaaaggcacgtctttccgttcgttggttttctgtgtgtaaggagtagcattgctgttggcgcctaacctcgcgtgcactgcattctcaaccccgtaccagtgcatcatcagaagccttcctcgtgaccataactctgtgtctgcagatatgtgttcccgtgtaagccagttttccccttttactcagactgatttcacctagattgtcacggtttccttcatgttaactttgcgtgactttgttcttcctttactactctgtatgtaatatatatacatatatacgtacatatgctgtccaaatatatttgtatatatttgtatagcatttttacacctttattgagtaatctggtttcgaaaggaggtgagagtttagtcccttctgcagttttctccaagctgtgtcctgtgaatttcaacccttggagcctaagaaaaccctaggaagatgatgttaatttgctgtcatttcctaattcaggatctatcatcaaatgaaacatgaaaaaaacagtgacttttaaggtgaaaagagtttcaagcattccaaataaattatcaatgtttcataactttttattataaacccacctcctaataggaagccaagtactatttgatacagtggtaaaaaccaaactaccttgaatttttttaaggcaacttatgaataatgctcattttcacagtcagaatagctttaaaatatggttgaatttgatacacacaggaagttttcttgaagaacaatcctttcgcttttcttttttcttgagagatctaaagagaaactgtagattgttttcctgacagcaaaagactaatgtgacaaaatgaagtcattgtaaagaagcgatgcaacttgtcaaatatttaataaagaattatggaagctggaacattttctacatca

SEQ ID NO: 358 - protein, 744 aa, Homo sapiens
MERPYTFKDFLLRPRSHKSRVKGFLRLKMAYMPKNGGQDEENSDQRDDMEHGWEVVDSNDSASQHQEELPPPPLPPGWEEKVDNLGRTYYVNHNNRTTQWHRPSLMDVSSESDNNIRQINQEAAHRRFRSRRHEDLEPEPSEGGDVPEPWETISEEVNIAGDSLGLALPPPPDGSRTSPQELSEELSRRLQITPDSNGEQFSSLIQREPSSRLRSCSVTDAVAEQGHLPPGAKDSPVRRAVKDTLSNPQSPQPSPYNSPKPQHKVTQSFLPPGWEMRIAPNGRPFFIDHNTKTTTWEDPRLKFPVHMRSKTSLNPNDLGPLPPGWEERIHLDGRTFYIDHNSKITQWEDPRLQNPAITGPAVPYSREFKQKYDYFRKKLKKPADIPNRFEMKLHRNNIFEESYRRIMSVKRPDVLKARLWIEFESEKGLDYGGVAREWFFLLSKEMFNPYYGLFEYSATDNYTLQINPNSGLCNEDHLSYFTFIGRVAGLAVFHGKLLDGFFIRPFYKMMLGKQITLNDMESVDSEYYNSLKWINDPTELDLMFCIDEENFGQTYQVDLKPNGSEIMVTNENKREYIDLVIQWRFVNRVQKQMNAFLEGFTELLPIDLIKIFDENELELLMCGLGDVDVNDWRQHSIYKNGYCPNHPVIQWFWKAVLLMDAEKRIRLLQFVTGTSRVPMNGFAELYGSNGPQLFTIEQWGSPEKLPRAHTCFNRLDLPPYETFEDLREKLLMAVENAQGFEGVD

SEQ ID NO: 359 - DNA, 8257 bp, Homo sapiens
acttgctggtattcccccggtatcagcagaggtgtgtacgggcactgctttaaaactgggaaggaggaagacgaggccagggagccggagggtcaccaaggtagatttccagcagcgctagtccagctgaacactttccagccttgtttttcagcagctttgaggaaaagtatagtgatccgtatgtgaaactttcattgtacgtagcggatgagaatagagaacttgctttggtccagacaaaaacaattaaaaagacactgaacccaaaatggaatgaagaattttatttcagggtaaacccatctaatcacagactcctatttgaagtatttgacgaaaatagactgacacgagacgacttcctgggccaggtggacgtgccccttagtcaccttccgacagaagatccaaccatggagcgaccctatacatttaaggactttctcctcagaccaagaagtcataagtctcgagttaagggatttttgcgattgaaaatggcctatatgccaaaaaatggaggtcaagatgaagaaaacagtgaccagagggatgacatggagcatggatgggaagttgttgactcaaatgactcggcttctcagcaccaagaggaacttcctcctcctcctctgcctcccgggtgggaagaaaaagtggacaatttaggccgaacttactatgtcaaccacaacaaccggaccactcagtggcacagaccaagcctgatggacgtgtcctcggagtcggacaataacatcagacagatcaaccaggaggcagcacaccggcgcttccgctcccgcaggcacatcagcgaagacttggagcccgagccctcggagggcggggatgtccccgagccttgggagaccatttcagaggaagtgaatatcgctggagactctctcggtctggctctgcccccaccaccggcctccccaggatctcggaccagccctcaggagctgtcagaggaactaagcagaaggcttcagatcactccagactccaatggggaacagttcagctctttgattcaaagagaaccctcctcaaggttgaggtcatgcagtgtcaccgacgcagttgcagaacagggccatctaccaccgcccagtgccccagctgggagagcgcgttcatcaactgtcacgggtggtgaggaaccaacgccatcagtggcctatgtacataccacgccgggtctgccttcaggctgggaagaaagaaaagatgctaaggggcgcacatactatgtcaatcataacaatcgaaccacaacttggactcgacctatcatgcagcttgcagaagatggtgcgtccggatcagccacaaacagtaacaaccatctaatcgagcctcagatccgccggcctcgtagcctcagctcgccaacagtaactttatctgccccgctggagggtgccaaggactcacccgtacgtcgggctgtgaaagacaccctttccaacccacagtccccacagccatcaccttacaactcccccaaaccacaacacaaagtcacacagagcttcttgccacccggctgggaaatgaggatagcgccaaacggccggcccttcttcattgatcataacacaaagactacaacctgggaagatccacgtttgaaatttccagtacatatgcggtcaaagacatctttaaaccccaatgaccttggcccccttcctcctggctgggaagaaagaattcacttggatggccgaacgttttatattgatcataatagcaaaattactcagtgggaagacccaagactgcagaacccagctattactggtccggctgtcccttactccagagaatttaagcagaaatatgactacttcaggaagaaattaaagaaacctgctgatatccccaataggtttgaaatgaaacttcacagaaataacatatttgaagagtcctatcggagaattatgtccgtgaaaagaccagatgtcctaaaagctagactgtggattgagtttgaatcagagaaaggtcttgactatgggggtgtggccagagaatggttcttcttactgtccaaagagatgttcaacccctactacggcctctttgagtactctgccacggacaactacacccttcagatcaaccctaattcaggcctctgtaatgaggatcatttgtcctacttcacttttattggaagagttgctggtctggccgtatttcatgggaagctcttagatggtttcttcattagaccattttacaagatgatgttgggaaagcagataaccctgaatgacatggaatctgtggatagtgaatattacaactctttgaaatggatcctggagaatgaccctactgagctggacctcatgttctgcatagacgaagaaaactttggacagacatatcaagtggatttgaagcccaatgggtcagaaataatggtcacaaatgaaaacaaaagggaatatatcgacttagtcatccagtggagatttgtgaacagggtccagaagcagatgaacgccttcttggagggattcacagaactacttcctattgatttgattaaaatttttgatgaaaatgagctggagttgctcatgtgcggcctcggtgatgtggatgtgaatgactggagacagcattctatttacaagaacggctactgcccaaaccaccccgtcattcagtggttctggaaggctgtgctactcatggacgccgaaaagcgtatccggttactgcagtttgtcacagggacatcgcgagtacctatgaatggatttgccgaactttatggttccaatggtcctcagctgtttacaatagagcaatggggcagtcctgagaaactgcccagagctcacacatgctttaatcgccttgacttacctccatatgaaacctttgaagatttacgagagaaacttctcatggccgtggaaaatgctcaaggatttgaaggggtggattaagcaccctgtgcctcgggggtggttgttcttcaagcaagttctgcttgcacttttgcatttgcctaacagacttttgcagaggcgatggcagagagcagctgcaggcatggtccctggagccgagccttcaccacgcactcgtccaagttcggatgcgggaacctggtcccagcttgagttcctgcctttcccaccacaaattatcaactggttgatgtgtacactaattacatttcaggaggacttaatgctatttatgttgtgcctctgcaggcaaagcccttaataaatattttacatcctttctaatgacaatgaatggaattaatcactcaacaggtatagtattacgactcatgtttactttttaaaatgatttagaccgattttcagattttatttcgttatgattaaagatgtctcatgtacttggaaaagtgagcatttttttttttttttgtatttcactttcataccaggcttaatgtcaatgacatttttatttttgaagtactctgacacctccaccctctactttattagaattggaaggcaaatttttgtccaaaaacctacagacaagtactttgagagaatttccaatataatattagacataatgataattttttccatactcagaatgaaaaactggatattacgtttttgttttggggtttttttgtacaaatttagctaatagctacaggctgagagaattgtaacatagcatgacaaattttgtgttgacttgaaaggaatcacaccattattccttagaagtaattacatgtgttctaacacatttgagacagggttggactcccatttctcatccgagaaattacttaacccttcctggcgctgtacagtcatcttttattctatttcctctttgctgtttgtagtagagacattttgaatgaaacttggcactgcttgattcaaaactgtggaaaccagatctgtttagtctcctgtttgtatgcgtttgctaatggtagctaaataaccagtttttgttgtaaatgcaccaattctgaaggcactttatgtactacatggaggtcatatctggttttgtttttatttttttatcatgaacattaaatgtgatgatgatttcttttccctgcacacatctttccggtgcaatatctatcaattgtgaatctggctgctggtgtataaaaacctggatgtaaagctgagcctacagacctgtcctcaccaactgttttgtgatttctactcaactacaaagatttatttaatgtactcttaatctaactgagttttgttaccaatgacctgttgcatgcttcaataccgtgtactgcctgagttgtgcctcttgtgtgctagattaaaagtgagacagagacttgacttgatcctctgagctcaagctattgagctggtagtggcagaggactgagggtacctgcacagtttgattcttttccacgtgtaagtctccattgcagaattgtcgtgctttgagaaaacacctgaggcagtgtgggagttgaacgaccctgctgtcctttttaacctgtgttgtcctagaccctgtcggggcagtcaggggacactagagatttgatctcatgcgagtcatcaataggacaaaaaagttgtggtttggggaggtctgtttgttacataaaaaggacctttcggtgtaagaaattgccgtttttaccctgccctggctggcatgtgagaagccatggaaggttgtggttgtaaatgagttgtctaaaggggtgcagaggcctgaggtttctaaaagaaggtagatttctacagagctgagtgttggttcctttttcttattggttgaaaattacctggtagtgatcagaaaacttagatgctatgtaactaaaaaaaaaaaaaaaaaaaaaaaaaaaaaaaaaaaaattcccgctcatgagttttgactattggtgagatgttttccgctacagttaacatgacaaatgtctcagtggcaaaaatcccctttttgtaagcccccatagtctagaggcagttttctttttaagaatcatgccagagcctgagtcgagcagtatgctttcttggtttttgagagtaattgtgtaattgtagagggagaaatccaattctaacctaagaactgggattcttctgtcatcttgtaaaccgtatattgaaaaaaacagaatgtcactaaatgcatattaagtcaagtattggaaagtataaaagaaaaatcattctgacaatttctaagccagaagcaaacaagaattactgaaatctaccccatgaatacttggaaggcagtaattgtgagtgacacctcagttcatcaaccccttaataatatcagcttaattttaatgacaactaaatatgctgaagtgaggatttagtattttttaaaaaagcaaaacaaggttcagtagtcctcagcaattctccaagtttctctctttgcctaaaatggtcatagatcttgatttctctgaatcgtgatgaccacacccagtcatcttcacagcataattgcaggtggcagtaaagagagtgtgctgggtaaggagcagttgctgggtcattccttgggccccgacctgcccggggagtagccctgggggagagagggcagtgttgcctatcccagaggtcccagcagtcacactgctctgcaggccgggctctctttatagccagagaaatcaccttaatgcagtctctttagttgtctgctgaagctgtagttattatgggccacttacatgaggctgagaagtacgtgccggagctcacacactgcctgttgcggttctcttaacatcagttatcacagctgcctgtgggtcccgggtatttccattcctgccccttgttggcccgaggaaggatgtggaaagagcacctggtgggatgaaggtccaacagcctgtgcctctccactgctggccctggagccggcagcagtgaggcattcattgtctgtgttgcggtgtattcccagcttcagtgctcttttcctttttgcctgaaatgtttatgcttctctgcagccagtcctctaacaaatctcaagaacaaaggtaagacacttggtttttgtttccaggacccttcagaaggtgacatcagatattccctaaattcagacaatgagggatacagagcgacttggcatgtattatttctcccatgtaaggacaaagggacagattattattgttatttctgagacagagtcttgctctgtagctcaggctggagtgcagtggctcaatctcagctcaccacaacctctgcctcctggcttcaagcgattcttctgcctcagcctccccgaatagttgggattacaggcacccaccaccacgcctggctaatttttgtatttttagtagagatggtttcaccatgctggccaggctggtcttgaactcctgacctcaggtgatcctcccgcctcagccttccaaagtgctgggattacaagcatgagccaccgcacccggcctcacagtgacagattctgagaaacagcatgcaaaacatttgaaccattttctacatctcccattgttgcatagagagtgtgcaccgctgctatcttgccagatccacactggtcctcccgaaagccaggttcatacacagcaactttttaattattctaacagttacccattaacagtcgactcctgtatttctgagagtcttgtactcacctctgaaatttaaaaacgtataaagagagcctgggttaatcagttctgcagcccctacgtgacactgtgctagttctccttcttctgtctcctccttaccctggccctgcacccctgtacttaagagggagaggtgggaggtgctgtctggtatcatttgctgcctcgccagtagagggtgccgctgtgcagggtaactgcccgcctgctcccttcctgacctcccctgaccccgaagatcactacctctgtcattcaggcattggggtacatcctgataagtcgtgtcagaactgccaatttcaggactgagatgtgtttttaaaaaacaaatccttataaactccactttgtactttagattttaaaactggggaaaaatgtgatattctttggaccacttttttaatttatataagccttaatgaacagtgtctatacatttgcatacacacacccccaccccagagtgttctcagtatgtcagagaaagtgccacagcattaggacgggagcttggagaacgttttctagaaaagggttagcttcctgttggcatgaaattttccaagcaaacctcattaaacatctgttgtttgttaaagatgttccactgaaagcaacgcatgtttcaaaggcacgtctttccgttcgttggttttctgtgtgtaaggagtagcattgctgttggcgcctaacctcgcgtgcactgcattctcaaccccgtaccagtgcatcatcagaagccttcctcgtgaccataactctgtgtctgcagatatgtgttcccgtgtaagccagttttccccttttactcagactgatttcacctagattgtcacggtttccttcatgttaactttgcgtgactttgttcttcctttactactctgtatgtaatatatatacatatatacgtacatatgctgtccaaatatatttgtatatatttgtatagcatttttacacctttattgagtaatctggtttcgaaaggaggtgagagtttagtcccttctgcagttttctccaagctgtgtcctgtgaatttcaacccttggagcctaagaaaaccctaggaagatgatgttaatttgctgtcatttcctaattcaggatctatcatcaaatgaaacatgaaaaaaacagtgacttttaaggtgaaaagagtttcaagcattccaaataaattatcaatgtttcataactttttattataaacccacctcctaataggaagccaagtactatttgatacagtggtaaaaaccaaactaccttgaatttttttaaggcaacttatgaataatgctcattttcacagtcagaatagctttaaaatatggttgaatttgatacacacaggaagttttcttgaagaacaatcctttcgcttttcttttttcttgagagatctaaagagaaactgtagattgttttcctgacagcaaaagactaatgtgacaaaatgaagtcattgtaaagaagcgatgcaacttgtcaaatatttaataaagaattatggaagctggaacattttctacatca

SEQ ID NO: 360 - protein, 846 aa, Homo sapiens
MERPYTFKDFLLRPRSHKSRVKGFLRLKMAYMPKNGGQDEENSDQRDDMEHGWEVVDSNDSASQHQEELPPPPLPPGWEEKVDNLGRTYYVNHNNRTTQWHRPSLMDVSSESDNNIRQINQEAAHRRFRSRRHEDLEPEPSEGGDVPEPWETISEEVNIAGDSLGLALPPPPDGSRTSPQELSEELSRRLQITPDSNGEQFSSLIQREPSSRLRSCSVTDAVAEQGHLPPPSAPAGRARSSTVTGGEEPTPSVAYVHTTPGLPSGWEERKDAKGRTYYVNHNNRTTTWWIMQLAEDGASGSATNSNNHLIEPQIRRPRSLSSPTVTLSAPLEGAKDSPVRRAVKDTLSNPQSPQPSPYNSPKPQHKVTQSFLPPGWEMRIAPNGRPFFIDHNTKTTTWEDPRLKFPVHMRSKTSLNPNDLGPLPPGWEERIHLDGRTFYIDHNSKITQWEDPRLQNPAITGPAVPYSREFKQKYDYFRKKLKKPADIPNRFEMKLHRNNIFEESYRRIMSVKRPDVLKARLWIEFESEKGLDYGGVAREWFFLLSKEMFNPYYGLFEYSATDNYTLQINPNSGLCNEDHLSYFTFIGRVAGLAVFHGKLLDGFFIRPFYKMMLGKQITLNDMESVDSEYYNSLKWINDPTELDLMFCIDEENFGQTYQVDLKPNGSEIMVTNENKREYIDLVIQWRFVNRVQKQMNAFLEGFTELLPIDLIKIFDENELELLMCGLGDVDVNDWRQHSIYKNGYCPNHPVIQWFWKAVLLMDAEKRIRLLQFVTGTSRVPMNGFAELYGSNGPQLFTIEQWGSPEKLPRAHTCFNRLDLPPYETFEDLREKLLMAVENAQGFEGVD

SEQ ID NO: 361 - DNA, 3558 bp, Homo sapiens
cgccgccgcgcgcagggagaggcgccggggctgccgcccggtgctcggcgcgctctcgggagccgcccgcccgctggtcccgcagccttccgggaggaagcggtgccggcagcgtccagggcgcgctctcgggcaccctcacctgccggcgcccggccgcttacccggcagggcgtgcgcagggtagggtgcgggaccggggggacctggaggcagaggggagaaccggccgtccgcgccgcagcacagccgctgggagcgcctcagaccccgcgcggggcgccggctccatggcgaccgggctcggggagccggtctatggactttccgaagacgagggagagtcccgtattctcagagtaaaagttgtttctggaattgatctcgccaaaaaggacatctttggagccagtgatccgtatgtgaaactttcattgtacgtagcggatgagaatagagaacttgctttggtccagacaaaaacaattaaaaagacactgaacccaaaatggaatgaagaattttatttcagggtaaacccatctaatcacagactcctatttgaagtatttgacgaaaatagactgacacgagacgacttcctgggccaggtggacgtgccccttagtcaccttccgacagaagatccaaccatggagcgaccctatacatttaaggactttctcctcagaccaagaagtcataagtctcgagttaagggatttttgcgattgaaaatggcctatatgccaaaaaatggaggtcaagatgaagaaaacagtgaccagagggatgacatggagcatggatgggaagttgttgactcaaatgactcggcttctcagcaccaagaggaacttcctcctcctcctctgcctcccgggtgggaagaaaaagtggacaatttaggccgaacttactatgtcaaccacaacaaccggaccactcagtggcacagaccaagcctgatggacgtgtcctcggagtcggacaataacatcagacagatcaaccaggaggcagcacaccggcgcttccgctcccgcaggcacatcagcgaagacttggagcccgagccctcggagggcggggatgtccccgagccttgggagaccatttcagaggaagtgaatatcgctggagactctctcggtctggctctgcccccaccaccggcctccccaggatctcggaccagccctcaggagctgtcagaggaactaagcagaaggcttcagatcactccagactccaatggggaacagttcagctctttgattcaaagagaaccctcctcaaggttgaggtcatgcagtgtcaccgacgcagttgcagaacagggccatctaccaccgggtgccaaggactcacccgtacgtcgggctgtgaaagacaccctttccaacccacagtccccacagccatcaccttacaactcccccaaaccacaacacaaagtcacacagagcttcttgccacccggctgggaaatgaggatagcgccaaacggccggcccttcttcattgatcataacacaaagactacaacctgggaagatccacgtttgaaatttccagtacatatgcggtcaaagacatctttaaaccccaatgaccttggcccccttcctcctggctgggaagaaagaattcacttggatggccgaacgttttatattgatcataatagcaaaattactcagtgggaagacccaagactgcagaacccagctattactggtccggctgtcccttactccagagaatttaagcagaaatatgactacttcaggaagaaattaaagaaacctgctgatatccccaataggtttgaaatgaaacttcacagaaataacatatttgaagagtcctatcggagaattatgtccgtgaaaagaccagatgtcctaaaagctagactgtggattgagtttgaatcagagaaaggtcttgactatgggggtgtggccagagaatggttcttcttactgtccaaagagatgttcaacccctactacggcctctttgagtactctgccacggacaactacacccttcagatcaaccctaattcaggcctctgtaatgaggatcatttgtcctacttcacttttattggaagagttgctggtctggccgtatttcatgggaagctcttagatggtttcttcattagaccattttacaagatgatgttgggaaagcagataaccctgaatgacatggaatctgtggatagtgaatattacaactctttgaaatggatcctggagaatgaccctactgagctggacctcatgttctgcatagacgaagaaaactttggacagacatatcaagtggatttgaagcccaatgggtcagaaataatggtcacaaatgaaaacaaaagggaatatatcgacttagtcatccagtggagatttgtgaacagggtccagaagcagatgaacgccttcttggagggattcacagaactacttcctattgatttgattaaaatttttgatgaaaatgagctggagttgctcatgtgcggcctcggtgatgtggatgtgaatgactggagacagcattctatttacaagaacggctactgcccaaaccaccccgtcattcagtggttctggaaggctgtgctactcatggacgccgaaaagcgtatccggttactgcagtttgtcacagggacatcgcgagtacctatgaatggatttgccgaactttatggttccaatggtcctcagctgtttacaatagagcaatggggcagtcctgagaaactgcccagagctcacacatgctttaatcgccttgacttacctccatatgaaacctttgaagatttacgagagaaacttctcatggccgtggaaaatgctcaaggatttgaaggggtggattaagcaccctgtgcctcgggggtggttgttcttcaagcaagttctgcttgcacttttgcatttgcctaacagacttttgcagaggcgatggcagagagcagctgcaggcatggtccctggagccgagccttcaccacgcactcgtccaagttcggatgcgggaacctggtcccagcttgagttcctgcctttcccaccacaaattatcaactggttgatgtgtacactaattacatttcaggaggacttaatgctatttatgttgtgcctctgcaggcaaagcccttaataaatattttacatcctttctaatgacaatgaatggaattaatcactcaacaggtatagtattacgactcatgtttactttttaaaatgatttagaccgattttcagattttatttcgttatgattaaagatgtctcatgtacttggaaaagtgagcatttttttttttttttttttttgtacaaatttagctaatagctacaggctgagagaattgtaacatagcatgacaaattttgtgttgacttgaaaggaatcacaccattggactcccatttctcatccgagaaattacttaacccttcctggcgctgtacagtcatcttttattctatttcctctttgctgtttgtagtagagacattt

SEQ ID NO: 362 - protein, 865 aa, Homo sapiens
MATGLGEPVYGLSEDEGESRILRVKVVSGIDLAKKDIFGASDPYVKLSLYVADENRELALVQTKTIKKTLNPKWNEEFYFRVNPSNHRLLFEVFDENRLTRDDFLGQVDVPLSHLPTEDPTMERPYTFKDFLLRPRSHKSRVKGFLRLKMAYMPKNGGQDEENSDQRDDMEHGWEVVDSNDSASQHQEELPPPPLPPGWEEKVDNLGRTYYVNHNNRTTQWHRPSLMDVSSESDNNIRQINQEAAHRRFRSRRHEDLEPEPSEGGDVPEPWETISEEVNIAGDSLGLALPPPPDGSRTSPQELSEELSRRLQITPDSNGEQFSSLIQREPSSRLRSCSVTDAVAEQGHLPPGAKDSPVRRAVKDTLSNPQSPQPSPYNSPKPQHKVTQSFLPPGWEMRIAPNGRPFFIDHNTKTTTWEDPRLKFPVHMRSKTSLNPNDLGPLPPGWEERIHLDGRTFYIDHNSKITQWEDPRLQNPAITGPAVPYSREFKQKYDYFRKKLKKPADIPNRFEMKLHRNNIFEESYRRIMSVKRPDVLKARLWIEFESEKGLDYGGVAREWFFLLSKEMFNPYYGLFEYSATDNYTLQINPNSGLCNEDHLSYFTFIGRVAGLAVFHGKLLDGFFIRPFYKMMLGKQITLNDMESVDSEYYNSLKWINDPTELDLMFCIDEENFGQTYQVDLKPNGSEIMVTNENKREYIDLVIQWRFVNRVQKQMNAFLEGFTELLPIDLIKIFDENELELLMCGLGDVDVNDWRQHSIYKNGYCPNHPVIQWFWKAVLLMDAEKRIRLLQFVTGTSRVPMNGFAELYGSNGPQLFTIEQWGSPEKLPRAHTCFNRLDLPPYETFEDLREKLLMAVENAQGFEGVD

SEQ ID NO: 363 - DNA, 3516 bp, Homo sapiens
ccgggtgggtggctgcgcagggccctacctgggcgggagcggctgcagagccctgtccacgcggtgcctccccagcacggcacctcccactccaggctgttggttacctggccgggagctggcggagaccaggatttctcctcgccgccgttgctgttgttaggggaaacagaccatctgcatctagacctgcctctctctccgctccccacttcagacgagctcttcctgcctggaatctgtgatccgtatgtgaaactttcattgtacgtagcggatgagaatagagaacttgctttggtccagacaaaaacaattaaaaagacactgaacccaaaatggaatgaagaattttatttcagggtaaacccatctaatcacagactcctatttgaagtatttgacgaaaatagactgacacgagacgacttcctgggccaggtggacgtgccccttagtcaccttccgacagaagatccaaccatggagcgaccctatacatttaaggactttctcctcagaccaagaagtcataagtctcgagttaagggatttttgcgattgaaaatggcctatatgccaaaaaatggaggtcaagatgaagaaaacagtgaccagagggatgacatggagcatggatgggaagttgttgactcaaatgactcggcttctcagcaccaagaggaacttcctcctcctcctctgcctcccgggtgggaagaaaaagtggacaatttaggccgaacttactatgtcaaccacaacaaccggaccactcagtggcacagaccaagcctgatggacgtgtcctcggagtcggacaataacatcagacagatcaaccaggaggcagcacaccggcgcttccgctcccgcaggcacatcagcgaagacttggagcccgagccctcggagggcggggatgtccccgagccttgggagaccatttcagaggaagtgaatatcgctggagactctctcggtctggctctgcccccaccaccggcctccccaggatctcggaccagccctcaggagctgtcagaggaactaagcagaaggcttcagatcactccagactccaatggggaacagttcagctctttgattcaaagagaaccctcctcaaggttgaggtcatgcagtgtcaccgacgcagttgcagaacagggccatctaccaccgccatcagtggcctatgtacataccacgccgggtctgccttcaggctgggaagaaagaaaagatgctaaggggcgcacatactatgtcaatcataacaatcgaaccacaacttggactcgacctatcatgcagcttgcagaagatggtgcgtccggatcagccacaaacagtaacaaccatctaatcgagcctcagatccgccggcctcgtagcctcagctcgccaacagtaactttatctgccccgctggagggtgccaaggactcacccgtacgtcgggctgtgaaagacaccctttccaacccacagtccccacagccatcaccttacaactcccccaaaccacaacacaaagtcacacagagcttcttgccacccggctgggaaatgaggatagcgccaaacggccggcccttcttcattgatcataacacaaagactacaacctgggaagatccacgtttgaaatttccagtacatatgcggtcaaagacatctttaaaccccaatgaccttggcccccttcctcctggctgggaagaaagaattcacttggatggccgaacgttttatattgatcataatagcaaaattactcagtgggaagacccaagactgcagaacccagctattactggtccggctgtcccttactccagagaatttaagcagaaatatgactacttcaggaagaaattaaagaaacctgctgatatccccaataggtttgaaatgaaacttcacagaaataacatatttgaagagtcctatcggagaattatgtccgtgaaaagaccagatgtcctaaaagctagactgtggattgagtttgaatcagagaaaggtcttgactatgggggtgtggccagagaatggttcttcttactgtccaaagagatgttcaacccctactacggcctctttgagtactctgccacggacaactacacccttcagatcaaccctaattcaggcctctgtaatgaggatcatttgtcctacttcacttttattggaagagttgctggtctggccgtatttcatgggaagctcttagatggtttcttcattagaccattttacaagatgatgttgggaaagcagataaccctgaatgacatggaatctgtggatagtgaatattacaactctttgaaatggatcctggagaatgaccctactgagctggacctcatgttctgcatagacgaagaaaactttggacagacatatcaagtggatttgaagcccaatgggtcagaaataatggtcacaaatgaaaacaaaagggaatatatcgacttagtcatccagtggagatttgtgaacagggtccagaagcagatgaacgccttcttggagggattcacagaactacttcctattgatttgattaaaatttttgatgaaaatgagctggagttgctcatgtgcggcctcggtgatgtggatgtgaatgactggagacagcattctatttacaagaacggctactgcccaaaccaccccgtcattcagtggttctggaaggctgtgctactcatggacgccgaaaagcgtatccggttactgcagtttgtcacagggacatcgcgagtacctatgaatggatttgccgaactttatggttccaatggtcctcagctgtttacaatagagcaatggggcagtcctgagaaactgcccagagctcacacatgctttaatcgccttgacttacctccatatgaaacctttgaagatttacgagagaaacttctcatggccgtggaaaatgctcaaggatttgaaggggtggattaagcaccctgtgcctcgggggtggttgttcttcaagcaagttctgcttgcacttttgcatttcctttcccaccacaaattatcaactggttgatgtgtacactaattacatttcaggaggacttaatgctatttatgttgtgcctctgcaggcaaagcccttaataaatattttacatcctttctaatgacaatgaatggaattaatcactcaacaggtatagtattacgactcatgtttactttttaaaatgatttagaccgattttcagattttatttcgttatgattaaagatgtctcatgtacttggaaaagtgagcatttttttttttttttttttttgtacaaatttagctaatagctacaggctgagagaattgtaacatagcatgacaaattttgtgttgacttgaaaggaatcacaccattggactcccatttctcatccgagaaattacttaacccttcctggcgctgtacagtcatcttttattctatttcctctttgctgtttgtagtagagacattt

SEQ ID NO: 364 - protein, 826 aa, Homo sapiens; identical to SEQ ID NO: 352

SEQ ID NO: 365 - DNA, 3795 bp, Homo sapiens
cgccgccgcgcgcagggagaggcgccggggctgccgcccggtgctcggcgcgctctcgggagccgcccgcccgctggtcccgcagccttccgggaggaagcggtgccggcagcgtccagggcgcgctctcgggcaccctcacctgccggcgcccggccgcttacccggcagggcgtgcgcagggtagggtgcgggaccggggggacctggaggcagaggggagaaccggccgtccgcgccgcagcacagccgctgggagcgcctcagaccccgcgcggggcgccggctccatggcgaccgggctcggggagccggtctatggactttccgaagacgagggagagtcccgtattctcagagtaaaagttgtttctggaattgatctcgccaaaaaggacatctttggagccagtgatccgtatgtgaaactttcattgtacgtagcggatgagaatagagaacttgctttggtccagacaaaaacaattaaaaagacactgaacccaaaatggaatgaagaattttatttcagggtaaacccatctaatcacagactcctatttgaagtatttgacgaaaatagactgacacgagacgacttcctgggccaggtggacgtgccccttagtcaccttccgacagaagatccaaccatggagcgaccctatacatttaaggactttctcctcagaccaagaagtcataagtctcgagttaagggatttttgcgattgaaaatggcctatatgccaaaaaatggaggtcaagatgaagaaaacagtgaccagagggatgacatggagcatggatgggaagttgttgactcaaatgactcggcttctcagcaccaagaggaacttcctcctcctcctctgcctcccgggtgggaagaaaaagtggacaatttaggccgaacttactatgtcaaccacaacaaccggaccactcagtggcacagaccaagcctgatggacgtgtcctcggagtcggacaataacatcagacagatcaaccaggaggcagcacaccggcgcttccgctcccgcaggcacatcagcgaagacttggagcccgagccctcggagggcggggatgtccccgagccttgggagaccatttcagaggaagtgaatatcgctggagactctctcggtctggctctgcccccaccaccggcctccccaggatctcggaccagccctcaggagctgtcagaggaactaagcagaaggcttcagatcactccagactccaatggggaacagttcagctctttgattcaaagagaaccctcctcaaggttgaggtcatgcagtgtcaccgacgcagttgcagaacagggccatctaccaccgcccagtgccccagctgggagagcgcgttcatcaactgtcacgggtggtgaggaaccaacgccatcagtggcctatgtacataccacgccgggtctgccttcaggctgggaagaaagaaaagatgctaaggggcgcacatactatgtcaatcataacaatcgaaccacaacttggactcgacctatcatgcagcttgcagaagatggtgcgtccggatcagccacaaacagtaacaaccatctaatcgagcctcagatccgccggcctcgtagcctcagctcgccaacagtaactttatctgccccgctggagggtgccaaggactcacccgtacgtcgggctgtgaaagacaccctttccaacccacagtccccacagccatcaccttacaactcccccaaaccacaacacaaagtcacacagagcttcttgccacccggctgggaaatgaggatagcgccaaacggccggcccttcttcattgatcataacacaaagactacaacctgggaagatccacgtttgaaatttccagtacatatgcggtcaaagacatctttaaaccccaatgaccttggcccccttcctcctggctgggaagaaagaattcacttggatggccgaacgttttatattgatcataatagcaaaattactcagtgggaagacccaagactgcagaacccagctattactggtccggctgtcccttactccagagaatttaagcagaaatatgactacttcaggaagaaattaaagaaacctgctgatatccccaataggtttgaaatgaaacttcacagaaataacatatttgaagagtcctatcggagaattatgtccgtgaaaagaccagatgtcctaaaagctagactgtggattgagtttgaatcagagaaaggtcttgactatgggggtgtggccagagaatggttcttcttactgtccaaagagatgttcaacccctactacggcctctttgagtactctgccacggacaactacacccttcagatcaaccctaattcaggcctctgtaatgaggatcatttgtcctacttcacttttattggaagagttgctggtctggccgtatttcatgggaagctcttagatggtttcttcattagaccattttacaagatgatgttgggaaagcagataaccctgaatgacatggaatctgtggatagtgaatattacaactctttgaaatggatcctggagaatgaccctactgagctggacctcatgttctgcatagacgaagaaaactttggacagacatatcaagtggatttgaagcccaatgggtcagaaataatggtcacaaatgaaaacaaaagggaatatatcgacttagtcatccagtggagatttgtgaacagggtccagaagcagatgaacgccttcttggagggattcacagaactacttcctattgatttgattaaaatttttgatgaaaatgagctggagttgctcatgtgcggcctcggtgatgtggatgtgaatgactggagacagcattctatttacaagaacggctactgcccaaaccaccccgtcattcagtggttctggaaggctgtgctactcatggacgccgaaaagcgtatccggttactgcagtttgtcacagggacatcgcgagtacctatgaatggatttgccgaactttatggttccaatggtcctcagctgtttacaatagagcaatggggcagtcctgagaaactgcccagagctcacacatgctttaatcgccttgacttacctccatatgaaacctttgaagatttacgagagaaacttctcatggccgtggaaaatgctcaaggatttgaaggggtggattaagcacccgcgatggcagagagcagctgcaggcatggtccctggagccgagccttcaccacgcactcgtccaagttcggatgcgggaacctggtcccagcttgagttcctgcctttcccaccacaaattatcaactggttgatgtgtacactaattacatttcaggaggacttaatgctatttatgttgtgcctctgcaggcaaagcccttaataaatattttacatcctttctaatgacaatgaatggaattaatcactcaacaggtatagtattacgactcatgtttactttttaaaatgatttagaccgattttcagattttatttcgttatgattaaagatgtctcatgtacttggaaaagtgagcatttttttttttttttttttttgtacaaatttagctaatagctacaggctgagagaattgtaacatagcatgacaaattttgtgttgacttgaaaggaatcacaccattggactcccatttctcatccgagaaattacttaacccttcctggcgctgtacagtcatcttttattctatttcctctttgctgtttgtagtagagacattt

SEQ ID NO: 366 - protein, 967 aa, Homo sapiens
MATGLGEPVYGLSEDEGESRILRVKVVSGIDLAKKDIFGASDPYVKLSLYVADENRELALVQTKTIKKTLNPKWNEEFYFRVNPSNHRLLFEVFDENRLTRDDFLGQVDVPLSHLPTEDPTMERPYTFKDFLLRPRSHKSRVKGFLRLKMAYMPKNGGQDEENSDQRDDMEHGWEVVDSNDSASQHQEELPPPPLPPGWEEKVDNLGRTYYVNHNNRTTQWHRPSLMDVSSESDNNIRQINQEAAHRRFRSRRHEDLEPEPSEGGDVPEPWETISEEVNIAGDSLGLALPPPPDGSRTSPQELSEELSRRLQITPDSNGEQFSSLIQREPSSRLRSCSVTDAVAEQGHLPPPSAPAGRARSSTVTGGEEPTPSVAYVHTTPGLPSGWEERKDAKGRTYYVNHNNRTTTWWIMQLAEDGASGSATNSNNHLIEPQIRRPRSLSSPTVTLSAPLEGAKDSPVRRAVKDTLSNPQSPQPSPYNSPKPQHKVTQSFLPPGWEMRIAPNGRPFFIDHNTKTTTWEDPRLKFPVHMRSKTSLNPNDLGPLPPGWEERIHLDGRTFYIDHNSKITQWEDPRLQNPAITGPAVPYSREFKQKYDYFRKKLKKPADIPNRFEMKLHRNNIFEESYRRIMSVKRPDVLKARLWIEFESEKGLDYGGVAREWFFLLSKEMFNPYYGLFEYSATDNYTLQINPNSGLCNEDHLSYFTFIGRVAGLAVFHGKLLDGFFIRPFYKMMLGKQITLNDMESVDSEYYNSLKWINDPTELDLMFCIDEENFGQTYQVDLKPNGSEIMVTNENKREYIDLVIQWRFVNRVQKQMNAFLEGFTELLPIDLIKIFDENELELLMCGLGDVDVNDWRQHSIYKNGYCPNHPVIQWFWKAVLLMDAEKRIRLLQFVTGTSRVPMNGFAELYGSNGPQLFTIEQWGSPEKLPRAHTCFNRLDLPPYETFEDLREKLLMAVENAQGFEGVD

SEQ ID NO: 367 - DNA, 7855 bp, Homo sapiens
cgccgccgcgcgcagggagaggcgccggggctgccgcccggtgctcggcgcgctctcgggagccgcccgcccgctggtcccgcagccttccgggaggaagcggtgccggcagcgtccagggcgcgctctcgggcaccctcacctgccggcgcccggccgcttacccggcagggcgtgcgcagggtagggtgcgggaccggggggacctggaggcagaggggagaaccggccgtccgcgccgcagcacagccgctgggagcgcctcagaccccgcgcggggcgccggctccatggcgaccgggctcggggagccggtctatggactttccgaagacgagggagagtcccgtattctcagagtaaaagttgtttctggaattgatctcgccaaaaaggacatctttggagccagtgatccgtatgtgaaactttcattgtacgtagcggatgagaatagagaacttgctttggtccagacaaaaacaattaaaaagacactgaacccaaaatggaatgaagaattttatttcagggtaaacccatctaatcacagactcctatttgaagtatttgacgaaaatagactgacacgagacgacttcctgggccaggtggacgtgccccttagtcaccttccgacagaagatccaaccatgggtcataagtctcgagttaagggatttttgcgattgaaaatggcctatatgccaaaaaatggaggtcaagatgaagaaaacagtgaccagagggatgacatggagcatggatgggaagttgttgactcaaatgactcggcttctcagcaccaagaggaacttcctcctcctcctctgcctcccgggtgggaagaaaaagtggacaatttaggccgaacttactatgtcaaccacaacaaccggaccactcagtggcacagaccaagcctgatggacgtgtcctcggagtcggacaataacatcagacagatcaaccaggaggcagcacaccggcgcttccgctcccgcaggcacatcagcgaagacttggagcccgagccctcggagggcggggatgtccccgaggtacgatgtccccagaatggtgcaaagcccggcagctccttcttcccattggcctatgtacataccacgccgggtctgccttcaggctgggaagaaagaaaagatgctaaggggcgcacatactatgtcaatcataacaatcgaaccacaacttggactcgacctatcatgcagtccccacagccatcaccttacaactcccccaaaccacaacacaaagtcacacagagcttcttgccacccggctgggaaatgaggatagcgccaaacggccggcccttcttcattgatcataacacaaagactacaacctggtgggaagacccaagactgcagaacccagctattactggtccggctgtcccttactccagagaatttaagcagaaatatgactacttcaggaagaaattaaagaaacctgctgatatccccaataggtttgaaatgaaacttcacagaaataacatatttgaagagtcctatcggagaattatgtccgtgaaaagaccagatgtcctaaaagctagactgtggattgagtttgaatcagagaaaggtcttgactatgggggtgtggccagagaatggttcttcttactgtccaaagagatgttcaacccctactacggcctctttgagtactctgccacggacaactacacccttcagatcaaccctaattcaggcctctgtaatgaggatcatttgtcctacttcacttttattggaagagttgctggtctggccgtatttcatgggaagctcttagatggtttcttcattagaccattttacaagatgatgttgggaaagcagataaccctgaatgacatggaatctgtggatagtgaatattacaactctttgaaatggatcctggagaatgaccctactgagctggacctcatgttctgcatagacgaagaaaactttggacagacatatcaagtggatttgaagcccaatgggtcagaaataatggtcacaaatgaaaacaaaagggaatatatcgacttagtcatccagtggagatttgtgaacagggtccagaagcagatgaacgccttcttggagggattcacagaactacttcctattgatttgattaaaatttttgatgaaaatgagctggagttgctcatgtgcggcctcggtgatgtggatgtgaatgactggagacagcattctatttacaagaacggctactgcccaaaccaccccgtcattcagtggttctggaaggctgtgctactcatggacgccgaaaagcgtatccggttactgcagtttgtcacagggacatcgcgagtacctatgaatggatttgccgaactttatggttccaatggtcctcagctgtttacaatagagcaatggggcagtcctgagaaactgcccagagctcacacatgctttaatcgccttgacttacctccatatgaaacctttgaagatttacgagagaaacttctcatggccgtggaaaatgctcaaggatttgaaggggtggattaagcaccctgtgcctcgggggtggttgttcttcaagcaagttctgcttgcacttttgcatttgcctaacagacttttgcagaggcgatggcagagagcagctgcaggcatggtccctggagccgagccttcaccacgcactcgtccaagttcggatgcgggaacctggtcccagcttgagttcctgcctttcccaccacaaattatcaactggttgatgtgtacactaattacatttcaggaggacttaatgctatttatgttgtgcctctgcaggcaaagcccttaataaatattttacatcctttctaatgacaatgaatggaattaatcactcaacaggtatagtattacgactcatgtttactttttaaaatgatttagaccgattttcagattttatttcgttatgattaaagatgtctcatgtacttggaaaagtgagcatttttttttttttttgtatttcactttcataccaggcttaatgtcaatgacatttttatttttgaagtactctgacacctccaccctctactttattagaattggaaggcaaatttttgtccaaaaacctacagacaagtactttgagagaatttccaatataatattagacataatgataattttttccatactcagaatgaaaaactggatattacgtttttgttttggggtttttttgtacaaatttagctaatagctacaggctgagagaattgtaacatagcatgacaaattttgtgttgacttgaaaggaatcacaccattattccttagaagtaattacatgtgttctaacacatttgagacagggttggactcccatttctcatccgagaaattacttaacccttcctggcgctgtacagtcatcttttattctatttcctctttgctgtttgtagtagagacattttgaatgaaacttggcactgcttgattcaaaactgtggaaaccagatctgtttagtctcctgtttgtatgcgtttgctaatggtagctaaataaccagtttttgttgtaaatgcaccaattctgaaggcactttatgtactacatggaggtcatatctggttttgtttttatttttttatcatgaacattaaatgtgatgatgatttcttttccctgcacacatctttccggtgcaatatctatcaattgtgaatctggctgctggtgtataaaaacctggatgtaaagctgagcctacagacctgtcctcaccaactgttttgtgatttctactcaactacaaagatttatttaatgtactcttaatctaactgagttttgttaccaatgacctgttgcatgcttcaataccgtgtactgcctgagttgtgcctcttgtgtgctagattaaaagtgagacagagacttgacttgatcctctgagctcaagctattgagctggtagtggcagaggactgagggtacctgcacagtttgattcttttccacgtgtaagtctccattgcagaattgtcgtgctttgagaaaacacctgaggcagtgtgggagttgaacgaccctgctgtcctttttaacctgtgttgtcctagaccctgtcggggcagtcaggggacactagagatttgatctcatgcgagtcatcaataggacaaaaaagttgtggtttggggaggtctgtttgttacataaaaaggacctttcggtgtaagaaattgccgtttttaccctgccctggctggcatgtgagaagccatggaaggttgtggttgtaaatgagttgtctaaaggggtgcagaggcctgaggtttctaaaagaaggtagatttctacagagctgagtgttggttcctttttcttattggttgaaaattacctggtagtgatcagaaaacttagatgctatgtaactaaaaaaaaaaaaaaaaaaaaaaaaaaaaaaaaaaaaattcccgctcatgagttttgactattggtgagatgttttccgctacagttaacatgacaaatgtctcagtggcaaaaatcccctttttgtaagcccccatagtctagaggcagttttctttttaagaatcatgccagagcctgagtcgagcagtatgctttcttggtttttgagagtaattgtgtaattgtagagggagaaatccaattctaacctaagaactgggattcttctgtcatcttgtaaaccgtatattgaaaaaaacagaatgtcactaaatgcatattaagtcaagtattggaaagtataaaagaaaaatcattctgacaatttctaagccagaagcaaacaagaattactgaaatctaccccatgaatacttggaaggcagtaattgtgagtgacacctcagttcatcaaccccttaataatatcagcttaattttaatgacaactaaatatgctgaagtgaggatttagtattttttaaaaaagcaaaacaaggttcagtagtcctcagcaattctccaagtttctctctttgcctaaaatggtcatagatcttgatttctctgaatcgtgatgaccacacccagtcatcttcacagcataattgcaggtggcagtaaagagagtgtgctgggtaaggagcagttgctgggtcattccttgggccccgacctgcccggggagtagccctgggggagagagggcagtgttgcctatcccagaggtcccagcagtcacactgctctgcaggccgggctctctttatagccagagaaatcaccttaatgcagtctctttagttgtctgctgaagctgtagttattatgggccacttacatgaggctgagaagtacgtgccggagctcacacactgcctgttgcggttctcttaacatcagttatcacagctgcctgtgggtcccgggtatttccattcctgccccttgttggcccgaggaaggatgtggaaagagcacctggtgggatgaaggtccaacagcctgtgcctctccactgctggccctggagccggcagcagtgaggcattcattgtctgtgttgcggtgtattcccagcttcagtgctcttttcctttttgcctgaaatgtttatgcttctctgcagccagtcctctaacaaatctcaagaacaaaggtaagacacttggtttttgtttccaggacccttcagaaggtgacatcagatattccctaaattcagacaatgagggatacagagcgacttggcatgtattatttctcccatgtaaggacaaagggacagattattattgttatttctgagacagagtcttgctctgtagctcaggctggagtgcagtggctcaatctcagctcaccacaacctctgcctcctggcttcaagcgattcttctgcctcagcctccccgaatagttgggattacaggcacccaccaccacgcctggctaatttttgtatttttagtagagatggtttcaccatgctggccaggctggtcttgaactcctgacctcaggtgatcctcccgcctcagccttccaaagtgctgggattacaagcatgagccaccgcacccggcctcacagtgacagattctgagaaacagcatgcaaaacatttgaaccattttctacatctcccattgttgcatagagagtgtgcaccgctgctatcttgccagatccacactggtcctcccgaaagccaggttcatacacagcaactttttaattattctaacagttacccattaacagtcgactcctgtatttctgagagtcttgtactcacctctgaaatttaaaaacgtataaagagagcctgggttaatcagttctgcagcccctacgtgacactgtgctagttctccttcttctgtctcctccttaccctggccctgcacccctgtacttaagagggagaggtgggaggtgctgtctggtatcatttgctgcctcgccagtagagggtgccgctgtgcagggtaactgcccgcctgctcccttcctgacctcccctgaccccgaagatcactacctctgtcattcaggcattggggtacatcctgataagtcgtgtcagaactgccaatttcaggactgagatgtgtttttaaaaaacaaatccttataaactccactttgtactttagattttaaaactggggaaaaatgtgatattctttggaccacttttttaatttatataagccttaatgaacagtgtctatacatttgcatacacacacccccaccccagagtgttctcagtatgtcagagaaagtgccacagcattaggacgggagcttggagaacgttttctagaaaagggttagcttcctgttggcatgaaattttccaagcaaacctcattaaacatctgttgtttgttaaagatgttccactgaaagcaacgcatgtttcaaaggcacgtctttccgttcgttggttttctgtgtgtaaggagtagcattgctgttggcgcctaacctcgcgtgcactgcattctcaaccccgtaccagtgcatcatcagaagccttcctcgtgaccataactctgtgtctgcagatatgtgttcccgtgtaagccagttttccccttttactcagactgatttcacctagattgtcacggtttccttcatgttaactttgcgtgactttgttcttcctttactactctgtatgtaatatatatacatatatacgtacatatgctgtccaaatatatttgtatatatttgtatagcatttttacacctttattgagtaatctggtttcgaaaggaggtgagagtttagtcccttctgcagttttctccaagctgtgtcctgtgaatttcaacccttggagcctaagaaaaccctaggaagatgatgttaatttgctgtcatttcctaattcaggatctatcatcaaatgaaacatgaaaaaaacagtgacttttaaggtgaaaagagtttcaagcattccaaataaattatcaatgtttcataactttttattataaacccacctcctaataggaagccaagtactatttgatacagtggtaaaaaccaaactaccttgaatttttttaaggcaacttatgaataatgctcattttcacagtcagaatagctttaaaatatggttgaatttgatacacacaggaagttttcttgaagaacaatcctttcgcttttcttttttcttgagagatctaaagagaaactgtagattgttttcctgacagcaaaagactaatgtgacaaaatgaagtcattgtaaagaagcgatgcaacttgtcaaatatttaataaagaattatggaagctggaacattttctacatca

SEQ ID NO: 368 - protein, 756 aa, Homo sapiens
MATGLGEPVYGLSEDEGESRILRVKVVSGIDLAKKDIFGASDPYVKLSLYVADENRELALVQTKTIKKTLNPKWNEEFYFRVNPSNHRLLFEVFDENRLTRDDFLGQVDVPLSHLPTEDPTMGHKSRVKGFLRLKMAYMPKNGGQDEENSDQRDDMEHGWEVVDSNDSASQHQEELPPPPLPPGWEEKVDNLGRTYYVNHNNRTTQWHRPSLMDVSSESDNNIRQINQEAAHRRFRSRRHEDLEPEPSEGGDVPEVRCPQNGAKPGSSFFPLAYVHTTPGLPSGWEERKDAKGRTYYVNHNNRTTTWWIMQSPQPSPYNSPKPQHKVTQSFLPPGWEMRIAPNGRPFFIDHNTKTTTWWEDPRLQNPAITGPAVPYSREFKQKYDYFRKKLKKPADIPNRFEMKLHRNNIFEESYRRIMSVKRPDVLKARLWIEFESEKGLDYGGVAREWFFLLSKEMFNPYYGLFEYSATDNYTLQINPNSGLCNEDHLSYFTFIGRVAGLAVFHGKLLDGFFIRPFYKMMLGKQITLNDMESVDSEYYNSLKWINDPTELDLMFCIDEENFGQTYQVDLKPNGSEIMVTNENKREYIDLVIQWRFVNRVQKQMNAFLEGFTELLPIDLIKIFDENELELLMCGLGDVDVNDWRQHSIYKNGYCPNHPVIQWFWKAVLLMDAEKRIRLLQFVTGTSRVPMNGFAELYGSNGPQLFTIEQWGSPEKLPRAHTCFNRLDLPPYETFEDLREKLLMAVENAQGFEGVD

SEQ ID NO: 369 - DNA, 1119 bp, Homo sapiens
atgtttatgttccagaagcataaacacatgacctgtgcccgtcccgtgttcttcgtccatgtccccagagaggccgtggatgggatggtgcaagaaacccatcaggaagcagaattaatccttcctgcgggtggtccctgtgaagaagacacagcggccggtggtgtgacagcccacagctgtcgaaggaagggagaagagagggaccgagggccagcaatagggttttacagctacgtgctagtcagggcccaacagagggacctcatgcgaggagttgctccacaggtgtggaggatgaaagaacaagttggggcgaccctgagagagcccagagacaagctctgcaggaagcaggcaccaccactgggccagtgctacctggccagctctcagccttgggaggccacctgcccgtgtttgacctgggttaatgaccgccagttcctttcccttaatacgactcatctgctctcctgcatgctcgctccttggggagagtcccgtattctcagagtaaaagttgtttctggaattgatctcgccaaaaaggacatctttggagccagctgccctctcatctgtcagggcccagtttgggtggcaacactcctgctgaggcccctgcccgcctcatcaccccagcccaagaggacagaacactgctgcccgcctcatcaccccagcccaagaggacagaacactgctgcccgcctcatcaccccagcccaagaggacagaacactgctgcccgcctcatcaccccagcccaagaggacagaacactgctgcccgcctcatcaccccagcccaaggggacagaacactgctgcccgcctcatcaccccagcccaagaggacagaacactgctgcccgcctcatcaccccagcccaaggggacagaacactgctgcccgcctcatcaccccagcccaagaggacagaacactgctgcccgcctcatcaccccagcccaagaggacagaacactgctgcccgcctcatcaccccagcccaaggggacaggacactgctgcccgcctcatcaccccagcccaagaggacagaacactgctgcccacctcatcaccccagcccaaggggacagaacactgctg

SEQ ID NO: 370 - protein, 373 aa, Homo sapiens
MFMFQKHKHMTCARPVFFVHVPREAVDGMVQETHQEAELILPAGGPCEEDTAAGGVTAHSCRRKGEERDRGPAIGFYSYVLVRAQQRDLMRGVAPQVWRMKEQVGATLREPRDKLCRKQAPPLGQCYLASSQPWEATCPCLTWVNDRQFLSLNTTHLLSCMLAPWGESRILRVKVVSGIDLAKKDIFGASCPLICQGPVWVATLLLRPLPASSPQPKRTEHCCPPHHPSPRGQNTAARLITPAQEDRTLLPASSPQPKRTEHCCPPHHPSPRGQNTAARLITPAQEDRTLLPASSPQPKGTEHCCPPHHPSPRGQNTAARLITPAQEDRTLLPASSPQPKGTGHCCPPHHPSPRGQNTAAHLITPAQGDRTLL

SEQ ID NO: 371 - DNA, 39954 bp, Mus musculus
cagggagtggcactattaggaggcgtggccttgttggaataggtgtgtcactgtgtgcacaggcttaagaccctcatcctatctgtctggaatcgagtcttcagatgacgatgtagaactttcagctttatgtgcaccatgcctgtctacatgttgccatgctcccaccttgatgataatggacctctgaacctgtaagccagtcccaaatatatgttgccctttataagactcgccttggtcatggtatctgtttacaacaataaaaccctaactaatcaatcttgtctatcaaaaaaccttaagttatacagaggtaggaaaacatgtaataaactttttgtacttatagccaacaattatttctgacccatcttttaccacccatcccaactcttccactgcattattgaagtagatacaagtatgtcactaggtatgcttcaggatccaaatgggatattctgttttccaacttcatgctgggtgttcactacaatgtgagtgtatataaacttagtttattatatggatttctacatttagagggccacatatatagtaggtatttaataaaatacaagtcacagagctgaggacacagcttagtgggcagctcttccctagagtggttagggtcctaggttcaaactccaataccaatactgcaaaaacaggaaaatcaaacaaaatgaaaacatcccagaataaactttttctatgcatttaacattcaagatacgcatggtatatacccatcttgttgatattgagaaacaagcacaatataagttttctcaccaacatttaggaaatattttctgtttatctcatacagtatgaaatgcatgaaaatgggtctgaccttgggattatattcagcatttcttgcacgaagtgcaatggtctttaggtcaagtttacagccaagattcacggtagatacaatatttctgcaagaaatttgaaaacatgattactgaaaatacataacttttaaacaacgaaggcaatgtctttaggtaaaatttacaaccaagattttctatgaatataatatttctgcaagaaatttgaaaagaaaatatgattaagattaattgataattcattgttttttcaccaagctttaatttaaaaaaacataataaaactctgctgactttagtccaaaaagtgctccataccagatattctcacttatactcaaaatgtcctatgaggtgttaactactcctcccatattcagacaaagcggctgagcctcgagggaatgtactagctttggcttgggatgcacatgataactagccagcttagccaaaccagcacatttcatgctagtgacaaatcccatcttaaaaaccagggtgtgaagccgggcagtggtggcgcacgcctttaatcccgaggcagagacaggcaaatttctgagttcgaggccagcctggtctacagagtgagttccaggctagccagagctatacctgactcaaaaaacaaaaacaaacaaaagaaaaaaattaaaaaataaaaaccagggtgggtagtgtcctgagaaagaacacttcagactctctactgacacacagagggtgcatgtacacacacacaaacatcaccattttccacccaggtctaaaggactgtttcatgacactatatcccgctcttcaagttgtctatgaaatactttgttttccatcttgagaccaggtttctctatgtagccctggccatactggaacttgctctgtagaccaggttgtcctggaacacacagaggtctgcctgcccctgcttcttcagtgctgggattaaaggcatgtgcttccaccacctggcctagaacttttaataaaaactgaaacatagcaaactcaactttttctgtagttttctaggtctttcaaagtagacagacctgaaatgaacaatgccatcaaatgcaattaatagaccatcaactgttacacaagaactccagacaaccagctctagttcattgttgctccctgctctctttttactctctacaaagaatacttttgaaatcttgtgactcaaagtcttgctgaacagcaaggcaacacggtgggaggcttaggcaggagtattctcaagaattcaaagcagctagcttatattccatagacagcaccaccctagccagctttatcacgtgagacagtctcaaaaaaacccccaaaaatttaatttaaaaattaaattttactggactagttttctctagtacataatcagaaagtgaggtagatcaaatgttttcaattttccaatatctatttccccccaacctaagaaatactaagaaaaattcttgttttacttaaaaatgggtttgactcagcatgcccatacgtgaagtgaattttcaggtacactttggtgcgcctgtcacaaatttagccatgcaaatgataaatgtgttattttagaaagttaaatattgggaagggggtaacatttggaatgtagataataaaataataaatttaaaaaaaagttaaatatttacctgaattctttataaggctgctgaactgacacctaataaggaatgtttttagataatggaaacagtaatgtggttgattgcatgctctgtggatatggaaaaaagtgtatgtcctaagctgactctcacaaatgattttaatcagaagtatgagcctgaatgcctgtggacgtcaaacaggcataaagaaatagtttacaacagtacaaacaaaaggagtgcttatagggcttatctctttaaactcaaaagtcaccttaaaattgtgtacagccaaggtagaatcaggttatgccacttagcttaaaaatgaggtggcatggcttacaaatgacgatatatatgcagaaagctaagtgtaaataggaaacaacgctgaaagtaggaaggtggagttactaaacacaaaacccaaatagtgttgtctgcaaagaactctttaatcagcctttaagctttcttaaagtaaagctagattcttgttactaaatggtatctggaaagtttgggctgtttgaggaagaaaaaagcctgaatctcccaccttttttacatgtgggaaatactttacttaggcagaaaaattcatcaagataagaactgctatccctactctgagagtgacatagatctccaaagatataaatacagccctcacagccaaaactgaagaaaatcctggacccctaagacctgtgctgatacagtcaaagctgtgatccaactggccagtgactcagccaattagctacaaggaaatgtccacagtatcactgaagctcagtttgcatttctgtggcccgaatacacaaacacaagcaactccatttctaagggaaagtctctgctgagagtactgacccactctgtagcttcaattcctacaagaacagataaagtcacagtataacagaattaccactgggccacttccttaagtaaatccagtgtctggaagcaaacagtacaataacactgagcgcctcctttggtgcagagacaaagggcaggggacagaggacaaggaacacaacagaaaacgcatgaatacatacgcgcatgcactcactgttacacacaggggctggggtggtgtgagaggtactcactgaagctgcggtacaattccagagctctcagaagctggtgtggcaggagtgataggggtcataggagtcattggtgaagggtacaagggggtggtgcctggcaacggtgcagtggtcagagtttgagaatggaagagttgtggggtctggcctgaggcaccctgtgtgggttgctgagatgttgattgctgtactgaggctgctgcagttgctactgcctgctgttgttgctgctgctgttgctgttgctgctgctgtctttgttgctcttccaaaatagagagactgttggtgttctgaataggctgtggagtaagtcctgtgccgtaaggcatcattggactaaagatgggaattccaggagtcatggcgccctgtggaaagcaaagagagcaatgattaagatactgatggtgagtaatttaggtttttccctagtgaaacccaagtaaagtaaaaagactaatgttttctgaatataataggtcattaaatactagggaagaatttgtatcctgagatgcacaactatcttctgtagtactgaccatagaagatgaacacttaggatttgaaaatgttatttatgatatgcaaggaagatgtttagcctctcatgtgtatctagaccataaagaaaaaagcctatgtcccaatttaaagtactgcccagtacccaggcatggtggcacgtctttaatcctagctctggaggcagaggcaagtggatctctgtgagtttgaagctagcctgatttacaacgcaagtttgagggatgttgttacatagagaaaccctgtctcaaccccacccccacccacaaagtactatttaatatatgatgattatccactgactaagcacgtgtcagttttggacgacggatcacatggatgatggatgacagactcatggatgcctctatcatactatttaataaaaagtaatttattctactaaaaacaaaaatcaacaaagtctgtaaaatactgccaactgccttttctataatgcttctatgtcttacatatatttaattataattaaacattttatttataaaaataaagtagaactaattatttatgtggaggcagaagaacactggagatggtaaaatgtatatggaattggtaacaatctaggtctaattctattgcaaacacatacacacatacgtgcacatgtttagcatcaaaaccaatgtttaattttgaaagcagatttggtagtaatcaggataggaaagtgactgcaacaggagcaataaatttatttattggagtaaataagataaatgctctacagctcatagagagtcttctaattaattaggttccaactaaacttcccaaacaaaagaacatcacagctatctaactcagaaatcttcacaaagtaaaacaagcttaaaaacctaaaaatccacgttcactactgcatggtaaatgtcactgtcttttgctttctcttaaagggaatatgagccctctctgcccctccctcttgctctattacctgtggggaggccaagccctgagcataaggtggaaggctgttgttctggtccatgattctccctttcttcagtactcagatcttccctagagcatcctctgaatatctccttagaaacgtcttcaatgttctgggttatcttcacacaccatgaaatagtgatgctgcttggaaaaatatgttttaagtttaatagatggacataggtttcatgttcacacaaaataaacacagaactattttggagtgtgtgtgtaaatacatacacacacacaaacatatgaatatatgtatcttttactctcaaagcctagtccatgtttcctgtgactcatgtaaaatcaccaacaaagacaaaacctttgttgctgtgtgcttaaatattctaatagtactgaaaattaaggtgtcaagaccagtaataaaaactattggagaaagggctggcaagaaacggtgcatcaggcaaaggcgtttgctgctaatcctaatattgtgcatttatccaaatggtgaaaggagagaacaaactctcacagccaattcttcacataaatgtaattcattttatatgtgtattttgtctacatatatgcctgtacatcactttcatgccttggtgccttccgaggccagaagagaaggtcagatgccctggaattgagctaccatggggtcatatgtatccttaaaataaacatgggtctttggatatacaacttgtaactttgaaacctgtgtgttctttgtgaatttagacaataaatatttagattaagataaaattgtagccaggcagtggtggcctttaatctcagcacttgggaggcagagtcaggcggatttctgagttcaaggccagcctgatctacagagtgagttccaggaaggccagggctacacagagacaccctgtctcaaaaaaacaaaacaaacaaacaaacaaacaaaaatcaaatttagggtgtgagagatggctccaacctggttctctagaagagttggcagtgctcgtaacctctgagccatctctcacagcatcaggggccagccctttgtacaacctccaccctcacttcccaccccccaccccccagcaaaggacttgaggttgggggaaagaattcctaaacaaactatactgttagaagagaacacttatcggcatgatttgcacagtctattaggtcacttcttgattttaaatatgctgctcagttttataccattcacaatacctcaagcataaagcgccatacatattgaactggacacaatatgctttaggtagttgtttgtgtttcaattaaaggcagactaaacaaaagatgaaacattatctcatcagagcatattaatgaaaactatgcctagaactgggtttctttaatcatcatctctttcgaggtcatggacatgaaatatgaataaagactaagagactatgaaatgtgttgtttttcctttgtaatggtagtagtgatagaacccagatcctcctaaatggtaggcaaaggcccaccctcaattttttaaagatgcttaaaaaaaaaaaaaaaaaaaaaaaactgcaggcatttactaagcaaggcaaaatgttgaaaagctgaaacctaggacaggacttggcatttgtgctcatgaatggatgctatggaagagagaatacaaactaaagtcaaggggctagagagctgttctgcgattaagagcactgttgctcttcagagggactgggtttgattatcttagcacccacatggctactcacaactagctgtaaatccagtcctggggagtccaatgctctcttttgtcttccatgggcccggacaagcatgtggtgcacatatagacagataagcaaaacattcacatatgtaaatcttttaaaaagttaagaaagacataactaaagtcaagtaccttctgagaggccggaactcgcacaaagcaggggcaatgtaacacaggtctagcaaaaggagcaaaaggaacaaaacaacacaaatcagcactctaggtgcagcacaaatcacagaagggaaagggggggacaaagccttggaagagcatgcagtgtgtgacaggctcagtatgtaaagtcactacaaaagatgacaaagcagctgtaggtggggttgcataattcagaatgtaagatgtcattacacaggcaatggaaacagttaaggattttaaggtgcagtttgagtatctcctgtgtcaaagagcagataaatctgagaaaattgaagactgaaaattcaatttcaatcactgctttggttgaggaaaaaaaaaaaagttggatttcatgtccaaagtataaccagttatttatccagatctctttctgcaaacgaagtttactgaacgcttgattatatagactggggaatttgttgtacgcttcgcagaagtcatttcacacctgcagacgatataaaccaccttttctcgtctgcaatcttaaaatcgcaataatcgctgcacaaacttatttttaggctgttttctgggttttcatcttttggaaactgagccatcaaactgagtatttgggaaaccgattccgcacagtcttcaagcgtctgcctaaccggtccggcatctttttccagagaagcctacccggagttttggaaaaccaccttaacttgaggctaaagaccgacagtgtgtaaataaagcagcatgcgtttttatgttaatctcgattagcttgactctcaggcttctggcgagatgctgagtctcgagaaccgcttcctaacagaattattcttactggggacaaaacgggcggctgcaggcctgggtaaaactctcccaccgggggaagcggctgagacgtgcggtgcgcggggctgtccggtgccagcccctcggagacgctcacccttggtactgggtttcaggaccccgccgaggcgatggtccagagactggttactcgcggagccgccgcagcgcgcgcggaggaccgttcccagcccggccgcgcgcccactcgcgtctcctccggcaaactccggggacccgctgcagaagtcgcctttattaaggcctccaagcagagaaaaggatgaaaggaccgttacctgggcactgcggagaaaatgacgcgaccgcagaaacctagccaaaccgccagcagatacccgccaccgctaccggactcgatccaccgaacgcctgacgcacatctgatgccgtcacttccgccagttgcgctcttgactgcagtccgatttgttgtgcttaagctgtgagacactgggaaggaaacgagcgggccgggtaccagcagttccggggcggggcctccgacggccctttctagctgtcaaagagagatctattgagtgtgtagcggaaacagttggggatgtggcaatggcgatcaagcccaagcaagcgttctaccactgaactacatcctcagtcttccatgatttgtttttgtgagaaagagtttctctgtgtagccccgactttcttgggactcactctgtagaactggctggcttcgaactccagagattgcttggcaagcttactggctcctcccctttgagatttgtgaggtggctaaggaaaatgtcaagcaaacgctcctcatcatgttctcagtagatgttaacttacgttcaaggaagaacaacaaaacaagcgactttgtagtcacagattcatttctatttttagctcggtcactaccagctctcttccttgctgccacaagaaaacgtcagctgtttcttaggctgcttcataatgcttgattgattccaacatatcttaatttttttttccttctgaagttcatctaaggcatatacatgtgttgttctgcgtacttcctttcccttgtattttgcattatcaacgaggtaatgagctcctttaggttaaggttagcgctctctctctctctctttctctctgtgtgtgtgtctgtgtgtgtgatggacagtatctgtgtgttatgtgtgtaggtgttgtataggttgtctatttacacagactctaataagtacaatagtactgtgtatctattttcccctaaaggaaacattttctcttgaaagtacaggaaacctcagaagactggggaattgagaaaacttaacaaaggcttgtcaagaggcaatataagggaagcgggttttatgttgtcttactgtttgaggagatacaacccagggggaagcatgccaactggattgcatccacagaccagaaacataaatagataaatgttagttcgcttcttctttatttagtcgggaaatccaggcaatgaggtggcgccgcttatattttagttgggtcttcgctcctcaattaaaccttgaaacacccgcatagacgcatccatgggttttacctacatgatgctaagttctgtgaaattaacaatattaaccatcatattctggctaaagaaatctggtattgcttcctgggtctcgtggctgcgtacaccacacagttgacatgcgtcctgattggccttgaatgcagcatgaactactaacccgtctcaaacgctgtgccacttcgccaatgtgacatccgagttgtcgttgctctgtaattgggttaatttttttggtatggtcagacttttaattttctatccgccatgagtaaatccaaacgttttcttagggttataaaacaggtttctctgttggcaggattggcggatccaggttgtgcgctagccggacgcaggcgtagacctccaagagcaacgacgagtgcaggctagaggagcctaggggggcggggcgagggaggcggaagtggaccggtcccggcggccattttgccgtgagacagcaggagttaggcgcgatgctttccactgctgcttaccgagacgtggaacgagagctgggaatggggcctcacggctccgccggccctgtgcagctgcggttttcgccttatgccttcaacggagggtaaaagcctgggcctgctgccctcacctgggtcgagcctggggtcgcgacgggcgggtgtgggaatggcagggatgtagcctgcagcccagcactcagttgtgcatggacgccctcggtgccgtttgctccagcaaccgggctcccacctcaatcttccgccctatggcctgttgtttggtagggcttgaacacgtttctaaagccaacgggcgaacatgaagttatgatttgtcttggttgttagacgagtagctgtttctgtcgctgggccgcctgatcacttgttgttttaagaggaaactaacatgattaaccagacttaatttcagggatgaaagtgaaggttgttttgttctgctcttgagacgtagcctgctgggcaaggtctactgagctgcatccacagccttaggcagtcggacccttgtgtgtgtttatttttactctcaaattactttagcattttaattatccgctttattcgaagatatttttcctttgtatttaggaccgttgacaatacaggggtattcttcatcaaattagaagttgaaacagctaattatccaaaaaaggggggcggggggggggcttgtttaagaaaagcaaaaccagccaggcggtggtggagcacgcctttactgctagcaaaggcaagtgggtctcttaagttcgtggccagtctggtctacagagcaagttccaggacagcctgggctacacggagaatctttgtctcaagaaagaaaagcaaaaacgttaaatatggctttatgaatgttgagcgttgatcatacagatagtgaaaggttgattttagtcttggttgtaccttttgaagagcaattgtgaatgtactatgtgggctcctttcagttacttatagattggggaagactcaaggtaggtttttttgtttgtttgtttgtttgttttaatttcaagcagttaagtgaataatttcatagttttacttcttgactcttggcatctaaacagcccaggctatagagctggtgtgaattagaaccggatttaaattcatagcgttctcagccgagtccagtttcagtttgcttttccagtatgctgcttaatgctgcacgtgaacactaagtacttactttgtaagatgtgttaatttcaaggtgttccgaatgcagtactcatgagtcactttttttaacctcctttacttcttcttatccatcactttgttcatagttacttacacctatccattaaatcacttttctcttttgtgccttttagcatttattgcaactagccctgcaagcagcctcagattctacaatatataaatttctctttgtagcttccaggtttttgtcacttgaggcctttatataattactaatcttttataattcctaagtctgtttctgtaactatttctcaaaagtccctgaaattccggcctctttgggaaaccgtatctaaccgagttttctgatctctccataacccatgttagtaaacaaaacaagcagggtaattgttcctttcagttactgctgctccttggaagtcttggctcagtttaaaggggtggggatatgttgttttcctcagcagacacatctagggagttgtaaaaccttggttgcatacattggtgtcgtatttgaatttgcccttcttcctcctgtcatcctgcgttccttctgtcacagcactcttactggagcagtattatgtcccatttcacgtagtactattgggagaattgtattaaaacctcactttgcaagtggaacattctcttttttgttctgtgtaactctgctagaattctaaactccagcttggtgcttggggtcttctacagcagcccatcacatgaggagtttgtatgtctctggtaaccttaattaagttgcttgagtggcctgtggtaatattttttcccttctgttgctgttcatggtatttgtaatgccattcttttttgctttggagttttagtgcaaaacttgcttcagtaaaaatagtaggtaatgttttctggatgtttattttctactaggaaataggcacttacatgaattatgtgtttaattctcacactctataacagaacagggactgtagtaccatcaatttgaacatgagaaatttatccaaagtcacacaactaataagtggcatgaataattccagtgcccaggtgcttagtcatcacatagtgccgtcctactgtgtacacatagtgctgtcttactgtattctacaatggttattgttcacttgctagaagaactggaaagtgtcaggtggattttatagttaactaatttaatccttatatacagcacactaatatgagatagtttctaagtaatctcatattttaaagaaattgaagtttttaagaagtactttgcttgagaaagcaacagtagtatctaggttctacttttgtgttttttctctggtgcccttcagtaagttatcagaaattgtacaggaagaaaagaaaagcttgctttttgactatggtatgacaacttttcctgggaaggcacacacacccacacacacatacatacatacccctacacgatttatgaaacatctacgtgacccttgggttactgcaattgctctgcagttggttaaaatttgattggagaacaatggatttttattgggattactatgtcaggagtgtcgggagatacttagagacgcaaggatgacccagaatcaactgtatcataaaaaagtccactccagaacagttgacaacgtataaaagccgtggctctggatttctgtgcactagtaggtagctcacaatttggaaaatctcttcttacagcttggccagtcagtctccacccccaacagttaagacaatgtctcactatgtaaccttagctgacctagaactcacaaagcctgcctttccctctcaaatactggaattcaaggtgtgtataggcctgtgttgctgttggtgggggtggaaggggctgctccaagtatctcaggagtgtcccctagatataacttggtttctctcaagccttctaccccacaagggatgtttcagttcagaggagactgctgtagacactgacagttcacgtaatgacatattctagcagctcttgggtaagaagatagagatcttctgaactcagcttgcttataggactgttaactatacttggtcttcaagaccacagacaggttgctttgtaatactgcgttagctatacgtgaatgtttttgtgctttaatgatgaaggttttattcagtgtctttcctattacctcttctcagtgaggtactgggacaatatgtcccattttaccttctgtgttccgtagctgagaaacctgaggccttcaggggtttatttgcgcactggcttatagctgcttaatggggagggctccattaggctctaggttagggctcttccaggatgacatgtagtcaggaatccgtttctccagtcttttgtctttcatttgaattctgcttttatgttagtacatttacccaggaatggcctgtaggacacgctaccatttgaagggacagaattgcaaccctgaagagttaatgtttgttctttctttccttaattcgttagtactgtattggcaattgctggagaagatttttccatcgtcgcttcagacactcgattgagtgaaggattttcaattcatacccgagatagccccaaatgctacaaactgtaagtaaatctttctttgttttttgttagagatttacttttattttaagtatatgtttgttgtgtttgtacatatgtttggatactgggaattgaacccacctgggtcctttggaagaatagctagtactcttaaccattgagctatctctccagctcacaagtaaatattcataaagacatttcacttgctttcttggtggcagctgggaagattatccatgtagctaatcacaaaacgaagtggaagtggaaccaacagggcttgagtttttttgcaaagaaggttaaggtgataaggaatagagaataaggaaggcagctttgctgtgtgttggtcctaggcatggtctacatctgccataaaaagcagtgaagttttgtcttccttgttcctggctacccaatttttctaactcattaacagttctttcataaggaaattagaattagactttactagtcatatgttcatatagttttaatttcatatttttttctgtagaagtagtcagacttatgaaacatctatatgatccttgggttactgccccgacctgcgggacagccgaacagggtctgaggaacacctgtggagaaaagggggtggggggcgcgagaaacacaaagaacggacagcaagtcaaaaaaccctgatcaagctgacagattttctttttcccaggcaggttttatacccatagaagcaggctatggggagggggtgacgcagaatcgcttcgtttctgggggaacgcaccagttcccaaaagcaggatattggctaggtaaaaagttcagcaggaggaacagaacagaatgggttgctagatacctgtccacaagatctgtagttatttgttcttaagtgggggtagtactttcccacagaggcctcaactcacagaaatttctcacagaaatctcaactaagctaatacttttccactaaggccaaggcttggtaaataagcacttatggctgacaaggcagttaacattcaaacagggtcgctcctaacagattacatcatacttcaccttctctagtactagattataagtagtaacccttattttccttagcctaatcatagtatatcttcggcccacctaaaattaatttggtgtaaggagatgttggtatgtctgctcccatgccgcaaaagccctggctggttgtcagtttatgagccttgctttatcaactcattctcccgaaactggcttttacaggacagacaagacagtaattggctgcagtggtttccatggagattgtctcactttgacaaagattattgaagcaagattaaaggtaggtgcttttgaacatgtcgctctgttgcaacaattcacagcacagctgcatttagagagacagcaagttagcaggtgcagttagcatatcctagaaataaagcagagccaaccctggctgtggaggtcattcaggtaacaggaaactgcagcacaggttagaggtctgctaaagtctctgtgccttggcagggctgtctactgtatagagggctcttctgaagtgtgtcagatctggctgtggcaaaagacagcctgggcagcgtatagctaggagcaggatttggaactctctgctcaccgttctcctcctccacagccttccactctagtagacagcacaaaaggaggaaaaaataattctggaacgtggtgaatggtggtagcccatcacttggcaggcttcggtggtaggtatgatgtgatagggatgtttttgggggtaggggtgaccacattctctgttgcctactgagttcacttaagggaacataatctcatagtcatggaaagttcacttacatttcctgtggggctgtggagaaattatttcacagtattttagaacgttttgcatagaaagcttcagaaatttacatttattagcagatatatcatgccttctagtagtagttcatattttactataagttatcttagaaattatcctgtatttgtctgcttctagtcatatagctttttgtaatttttcagtgttctgaccttgacttacaattcttaggttttgctttagaaatgcttgttggctgattatgggatggatccccgggtagggtagtctttggatagtccatcctttcatcttagctccaaactttgtctctgtaactcctttcatgggtattttgttccctattctaagtaggaataaaatatccacccgttgctgttccctcctcttgattttcttgtgttttgcaaattgtatcttggtggtctatgtttttgggctcatatctatccaaggagctgaaggggtctgcacccctataggtggaacaacaatatgaactaaccagttacaccccccccccaagctcacatctctagctgcatatgtagtaggaagaaaggccccttggtcttgcaaactttatatgcctcagtacaggggaatgccaaggccaagaagtgggagtgggtgggtaggggagtagggcagggggagggtatagggaactttcaggatagcatttgaaatgtaagtaaagaaaatatttaataaaataaaatatgaagtcagataaaaagaaatgcgtgtcgtggaatccctttaaccccagtcaagagacaggcaggcagatctttgtgagtttgaggccagtctggtctataaagtgagttctaatgcagccaggaaggggttgttacacagaaaaaccctgcctcaaaaagcaaacaacgaaaatgatgaacttaattcattttatactcaaatttttgtggaaatttttatcctgattatataatttcatttattttattcgtatgggggtttgactacacacttgtacaccatgggtgtgcctggtactgggaggttaggaaatggttccagatgacttggaataggccgtgaatggttgtaagctgccatggaggtgcagaaccaaacctaggtttgcaaagcaagtgttcttaactcttctgagcagtccctctagtccccagggtcattctttttatactgttttccttggtagacaatttgagaagtaagactgcttccccttgataatgtggaccccaaatgatgcagtcaactgatttctgtttgtaagatactagatcataaatattttaaaactcaagggccatttcatttctgtcacagctgcccagttggattaagaaggcagcataaacaacttggttatacttgaggagaattttacttgtagaagcaggtagcagcaggtcaagctcctggtgctgataccattgtagtgcatagtgcagaaagagatacatttggaacaccttccccgggctcaccttacatgccctgcgtcttaaattgttgtggaattagtagtgtctgaaaggaagaggggagagtagaaaggctctttaaccccaccttcttgtcattcttcctcctaaaactctttttgttggttggttttaagaccgggtctctatgtagtcatggctgtcctggagtttgatgtgtagaccgggctggtcacaaactcattccttgaatgctgagacaaccgtgtactcactgtaaccactatagaacagaacaacaactcgacaaacaatgagttcactggttatttagaggagcatggtgagggcctacttcccgagcctgagctcctgcgcacagttgcatcatcctgtgcccatccagcatagacgacagttcaggaagcagccttcccctgagtccctcccatcagagtgatagttttcttttctcagcagttgttcatgttgtataaccttgaggaagaccctcttgaattttgttggtttcagctttcctggcatgtgtcaggtttagtcacattccgagttttgctcttcttttccaggaaatgtttgtgatctgaaaaacaagctactgagcatctcaaatatatgtaatgaaatattattttatgttagtaccattgtattatttgatcatgaaagaaataagcttttgtgtttcactaaggaatacctatagtgtgtactggttgttactgaagcttgacagattctgtttctactctactgaatctctctgttgtctccccctccccgccccccaatcctactaaaaataacccatgaagatgtacaagcattccaataacaaggccatgacaacgggggcgattgctgcaatgctgtctaccatcctgtactcacggcgcttcttcccttactatgtttacaacatcattggaggacttgatgaagaaggtaacagcttgctttctggcaaatacaaaagtgttatttcataaatgtgtgtgcttctgcctggagttgtgctatctagcccagcagctttgctctttgatcacgaaagtacaacaaactgaagctaaaagagataaataccactcagtgacatacagcaaggatggtatctggtgcctggtgacctgatagttatttgttttttcaggatctggtattgatagctattttctttcatcttacagattacataacatagttaattcaaatagtcctttttaaaaacatatttttattttatatgcattggtgttttgcctgcatgtatgtctgtgagggtgtgagatcccgtggagatagagttacaggcagttttgggctgccatgtggcttctgggaattatacccaaatcctctggaagaagagtagccactgctcttaactgccaagctatctctccagccccctcaaacagttcttgaaaaggaatttcaggggctggacgaactcgtggttaagagcaattctgctcctacacaaaggcttgaatttagttcccagcaccaacatggtggctctcaaccatttgtaactccagtccggttccaaggggtctgatgccctctggagatctgatctgacctctctctggggatgtcaggtgtgcacgtggtgctcatacagacacccacaaaggtagcccacaacagaccaaagtccagcatagtgaaccaaggagtcttattggggttccttacaggacagtgggtgaggggttccttacaggactgtgggtgaggggttccttacaggactgtgggtgaggggttccttgcaggactgtgggtgaggggttccttgcaggactgtgggtgaggggttccttacaggactgtgggtgaggggttccttacaggactgtgggtgagggattccttgcaggactgtgggtgaggggttccttgcaggactgtgggtgaggggttccttgcaggactgcaggactgtgggtgacgggttccttgcaggactgtgggtgaggggttccttgcaggactgtgggtgaggggttccttacaggactgtgggtgaggggttccttgcaggactgtgggtgacgggttccttgcaggactgtgggtgacgggttccttgcaggactgtgggtgaggggttccttataggactgtgggtttggggttccttacaggactgtgggtgaggggttccttgcaggactgtgggtgaggggttccttacaggactgtgggtgaggggttccttgcaggactgtgggtgaggggttccttgcaggactgtgggtgaggggttccttgcaggactgtgggtgaggggttccttgcaggactgtgggtgaggggttccttgcaggactgtgggtgaggggttccttgcaggactgtgggtgacgggttccttgcaggactgtgggtgacgggttccttgcaggactgtgggtgaggggttccttgcaggactgtgggtgaggggttccttgcaggactgtgggtgaggggttccttgcaggactgtgggtgaggggttccttgcaggactgtgggtgaggggttccttacaggactgtggctgaggggttccttacaggactgtgggtgacgggttacttacagggacagagatgactcaaaggcagctgcatcaccaaagctggaaacttgcagcacacttacagcctgcagggtggacagtgtcccttctagttaggtggtttagttgagcgacacattcccaggctgcatctctcctccttttttgcagcttggcttttcatgaacatgactggtggtaatatttatttactcttgatagaggggggtgggtcttataaatctggtctgtttcaggggcttcctgaagctgttctaagttgttgacttctgtcttagcttccttccctgcaggataaaatgctttaatcaggaaggaaactgctacacagcacattcgtacatttaggcaaaagacagactccttaaggagaaataaatctgttttgttgttgtttaaaacataatattgtaatccgtgcctataacttggcagctgaagtggaagggttgtatcattcatggactattcaagaccctgtcttcaaaaacaaaggtgatttgagtgagttagtacctctagtgctctcagtgtatgtatctttttttatttttttttctgtcagagtaagataggatatattttttaagacttcagctggatctggtggcacatggaatcacagcactcagataggcagaagagcctcttgagtttgaggctagtctggtctacatagccagttttagaacagctaggactgtgtagagagatcccatctcaaaaaaacaaaacaacaacaaaagatttttgcgtgtctgtgtgtttttgctccccagtctcatttttttttagttcctggagaattttgtgcagtgtattttaatcatggtcacccatctcccgttcctcccagatacaccactctctagtttccttaccatccaacttcctagcctctttgttttcatctttaaaccatcaggtacagttgttgttactcatattctcggatgtgtggtcttccactaaaatgtggtcagcctgttaggggactcacccttaaaactgactccctctaccaatccctgtcagttgcctaaagctccttggctagggtggtacttcttgtctacttctctatgctggcatgtttgtctggcttgagcttgcttgggtcttgtatacaaatcacaactgctgtgagttcttgtgtgcaagtgtccctcagtgtccagaaaagagtttctttgtagttaacaccacctcgcgcaatcttttcactcacataaatatgtataatgggggctggagagatggctcagtgttaaagagcaccgactgctcttccgaaggtcctgagttcaaatcccagcaaccacatggtggctcacaaccatctgtaatgagatctgatgccctcttctggtgtgtctgaagacagctacagtgtacttacatataataaataaataaataatgtataatgataactaaatctcaagaaaccgttgtaggggctggagagatggctcagtggttaagagcactgactgctcttccgaaggtcctgagttcaaatcccagcaaccacatggtggctcacaaccatccgttaagagatctgatgcccaataaataaatcttagaaagaaaggaaggaagaaagaaagagaaaaaagaaaccactgtagaagattgactttttcattgtgtgtggagatgtgatatgcatgtaagtaagtgtgtgtgccttaagtgtgtgagaccagatgtgtcagagctgctgtttattagaagctgttgtgagctacccagcaggtgctgggaatccagcactaagtacaaatcttaactactgagccatctctccagcccagatattcgttgttttaggattgaatctaagacgtaagaaaaaaaaatcagtctttaggagtggtggtataaaaacaatgcattatatgcatgtataaaattatcaaagaagtaatttataaaaattatacaaccagtatctacaataacttttttaaaatagcaactttaaagagaaaccagtctgtgtgactggttttctacctggatctttttctacctggatcacagcagggagctcctatgatggaatgtaggtgaaactgagggctttgcctcagggctagtacatttcacccctgcctttcctctctccatggtggatggctcctctgagcctggtacatggtgcctcctggattgtttctgaccatcacaaagaagtcctttaccttgccccttgctttgaatctggctcctcccccccccttttttttacgatttgtttatttttaatgtatatgagtacactatcactgtcttcagacacactacagatggttgtgagctaccatgtggctgctgggaattgaactcaggacctctggaagagcagtcagtgttcttaaccactgagccatctctccagctgccttgagttcgtttgttaagctttctttttctgtctgctttggtggtgtatgtctttcccctggtctagtggaggggttgagtatggtttttggatctttgctaagtccttttgcttggttctgacacttcacagtggccctccaggttgttcctcttcactgtttcctcgctcttgtcgtccttgccgtccttgcttgcctgtcctgattttctccacaactgcagcttatttgttcctcattcttgttgcctgtggatagtccatctttttgtcttatgtaaaagtaacttttattctcttgatgtcagagggttgcttcctctgtctgctaacctgggcttagtcctggaagcttgtggcttaggcctagattttttcagcctctgagacttgttgctcatcctttctagttgtttctgaacttgggctggctgattcatctcagctgttctggcccaacactggcctctctacgctgactgattgaaactggcttttctcagcttctgactgaattgctctgcttggcctcatattaactttggtaatatgttgtaatcttctggctccttctcagtctctggcttgttctgtcctcacctgtgtctggcttgttctctgcagcctgtctctgtacccagtaaaactatcttaagtctcctctcttccccctcgtctcatgagagttgggatagcctgttctgtcaaatcttattcgtccttttctgccgctcactgacatcattttcaaatatgggtgcttcttctaaaactaactttacctttattgtttgagattaaagatgtacgctaaggctgagccacactacaactagaaataggttttcccagtaaacaacacaatcatgggatttgcattgtgatcagatttcctgcaaaaatcttgttctgatttttgaaaattccctcctttattttttaaattctgttgttacttttatttctagtgtcttttaagtttttaagaattatacttttgttactttattaggagttctgcgttctctacattttttttttaattcttgtattctgtattttatactggggctcttaattataatggggtgttaatttagggctcttccttcatcatgaaaagtgatgaaaagtctgattagtagtcctaagcagtattctagtatacattattactactataacttctaaacatttagttctttgatgatttcatacatacatatagtacattacagttcccatatacctcatgatgagtgatctttagtcttctaggcttacagctggagctttttgtaagtcagttttctgtctctgttttatgcttctgatctttcctgtccactcagccaaggtcaccaagtgaactaaaatctcaaaagacttactggcttttaggcagtaggatgggtgttaagtatagttttcttaccttttttgggatttgaaataagtcttactgactttcaaattttcagttgaataatccgatgtttgtctgatgggtctacctgtttttctcttactactttcactgtgctctttgttctttatactgctgtgccagggaaatgttagtgatccccaaaaacacacagaggagccaattttttttttttaaatctatctatttatttatttatttatttatttatttattatatgtaagtacactgtagtgtgtcttcagacactccaaaagagagcatcagattttgttacggtggctgtgagccaccatgtggttgctgggatttgaactcaggacctttggaagagcagtcggcactcttaaccactgagccagccccaaaggagccagtttgatgcagctcacagcagggtctttattctatttgagctagcttggggctcccccgcaacccacctcaggacgggtttggtgatgggagagccctgaatgtctatcagggcaaggctttgtagtaaacagcaagcagggagcatgtgtgcaagcatctaattagaaagctcctgtggcctttaacatgattggctggtgctggaagtctatcatagacttaacttcggctcccctctgcattggtggtcattaccagggggtgggcttgtaacctggggtgcaggtttgttgggggaataacctggagacactggtctggttgagggtgtaacctggagatactggtcttgttgtgggtgtagcctggagactagaaacatcttcctgtccttggaaatatataattacataaaaagaggaaagatcaaggacaggaagatgtaggaattaaagggggagggtgtatgaggtgtggctaaagagtaaaaaattgcctttggggccagcctagtctacagaggaagtgtctgactgctaggactagacagagaaaccctgtcttcaaaaacccaaacaaacaaaaactcctaaattatatacaaacaaaagcaaaaccattatgaaacatatgcaagaaagaaaataataataagaaattaaataatagagaataagagataaagggaatatttgtaaaattaattgctggcacatctgtgctgacttgaaagtggggtgctcaaaacaccctggtgtgctggaagggagactgggacacattttccctgtagtctgtgttctcgggggttatctggggctgttgaagctagaggcctgcttctgtggtcatctctggtttcaccagggatcttgatccatagtttcttgtggtttgggtttgaggtttttttgtttgtttggttttttgtttgtttggtttttttttgtttttttttttttaaggtctcagtctatagcccaggtttgctattatcctcttattccagcttctcaactgacagtattacagacactccacagttggttttgttttgttttgttttttcttttttgtttttcgagacagggtttttctgtgtagtcctggcagtcctggaactcactctgtagaccaggctggcctcgaactcaaaaatctgcctgcctctgcctcccgagtgcttggattaaaggcgtgcgccaccactgcccagccttttcttttcttttcttttcttttcttttcttttcttttcttttcttttcttttcctttcctttcctttcctttcctttcctttcctttcttttcttttcttttcttttcttcttttttctttctttctttcttctttccttccttccttccttccttccttccttccttccttctttctttctttctccccccctctctctttttctttctttcttcttttttgttgttgttagcacagttgtttttaaaagacctcttctaggggccggagggatggcttagtacttgctactctttcagagactgcaggggttaagttcccaggacccatatggcttctcacaaaggtctgtaacttaagttccaagggaaccccgccctcctctggcctcactatgcacatcatatacctacaggcaggcaggcgggcaggcaaaacactcagacacagttgttaaagactgtctaaaattgtagtgatgtgttctttgataaaaattccaggtctatatacgcatatggtactgtcttagttagggttttactgctgtgaacagacaccatgaccaaggcaagtcttataaaaacattatttaattggggctggctcacaggttcagaggttcagtccatcatcatcaaggtgggagcatggcattatccaggcaggcatggtacaggcagagctgagatttctacatcttcatccaaaggctgctagtggaagactgacttccaggcaactagggtgaggatcttaagcccacacccacagtgacacaactactccaaccaggtcacatctattccaacaaggccacacctctaaatggtgccactccctggcccaagaatatacaaaccatcacttgtaccttccagtttttctcaatagtagaaattttaaaagttctgttttaaagtcagttccttggatggggtgtgtttgccctggtgcagatatgaaagtcagaggacaaccttccaaagctggttctggcctgtcacaaggtaggttctggggatcaagttcaagtcaacaggctttgcagcaagtgccattaccaagtgccctggcccagtctcatcagtgtgctaactcatgctgagcactctgaggctctgaggaggttaagtatattaacctcttcagtaactgtgaccaacaccctgaccacacaaggtgcagcagagtgcagcagctggctccaaggtttgcttgctttaccttttagacagtgatgtggttttatgaatgagtgccacctttctaataacttttaagatgccttttttttctattttgaatactgcagaaatatctacctatgttagaaacaaacaataatttcagtgtttcacaaagaattcacaaagtcaaagtatcaaaccaggctggcaacacaccagggttgttatcctgatttttttttcatccttggtgatagtacctcatcccattagtgaaaactccgggtcactaactggcacaattggctaatgggcatgaaaattcaagaaaagtgattccttaccaggctgctttgatttacatctttttcttataaatgtgtaataaatgtatatatttacaattatcttttaggataaatcctgccaaaaggcatagtttgatttcagtggagtctgtaaggactgctggttggtttgttgtattgagttatgtttctcttacaggaaaaaaaaattactcttggcctagagagatggtttagcatttagagtctttcatgccctcagaggacccgtttggattccagcacacacactgggcaacttacagttgcccgtgactcagtcccaggaaatctcttggccctcatggatacctatacatatgatgtagacattcacatagatatacacataaataaaagtaatctctattttttaagttattccttattccagtaattcaaggcaagctgtaacattttgggcaaaacaaagcgcttaatagtacgcatttgtgttttgctaaaactctttattaaatattaaataaaaaattaaatattgccattaattagaaattggtggtatttggcagggatggttctcgctctttacctgagtctaccaaggattcactatcctcctgccttagcctagaatatggtgtcttagttcgggtttctattgctgcaatgaaacaccatgaccaaaaagcaagttgggaagaaagtttatttggcttacattttcatactgttgttcatcattgaagaaagtcaagatgaaacagtaggaacctggaagccatggaggagcactgcttactggcttgctcctcataacttgatcagcctgctttctcatagaacccaggaccactggcccagagacggcatcacccacagtggctgggccctcctgcatcaatcactaagtaagaaagtgcactacaggtcaggcttcagcctagtgttatggaggcagtttttcagttgaagttgtctcctctctgatgactctagcttgtgtcaggtcaacataaaactagctgatgcaggtggttttttacagtatattgttaaaaggtatgttcatcgaatactaaaatgatagacaataagtctgtggttttattacttagatttagctctaagaagaatttaaactattgggtttatgctaaaactccacaagcttatttgttagggatagcatgaagcttttggttagaacttcaagtaaggcctgtgatcattacccaatgtgtctgaatggcctgcctgcccagggccatgggacagttgtcaatgacattagttttagacaagttgaccacagggttaggtcactaagatgtgaacctcttgtctctgacctcattccataaagaatagtctgctggggtccactgcaccacagtaactgggttctgacctttgtcagaagtttagctaagtggctagataacactctgcatcatgttttgacttccttttgacagtgttgttgtactctttcttctttaaggaaagggagctgtgtacagctttgacccagtgggctcttaccagagagactctttcaaggcgggaggctcagcaagtgccatgctgcagcctctgctcgacaaccaggtaatgtgcttgagcagagctctgcctgtggcagcgtgggcagctgtggtagcctccagtttctcattctgctgagatgctgctgaggtcttctgacgccgctcttttctctgctctgtcagtgcccttcagtcctcagctgcccatggctctataggctctgtctgcagccattggtcatgtctcgcttatcccatgccatcttaccttacatcacacaatgcctccttcattacccttactgtttctgggttatagtcgattccccaaacttttaatttgtctcccccccccctttttttaataccaccttgatccagacctgcgtttattgggttttctcagaggccttcagcctccaagctcagtaacccaatccgtgctgcctgtggttcctgtgccttgctttctgctgctgtgtgttcatctcacctgtgccacactctgccttctcctatctgatctcgcgctttagttagcaatgtttgatgctcttgtagttcagtgccttctcctagttttgatcctactgccattataagagtaccatgaccaaaagcaacttggggaagaaactcagttcatttcagtttaagagcttgtactctgtaatggagggaagttgaggcaggaactgaagcagagaccctgaaggaatgctgcttactagcttgtaataactggctcaaactgcttccttactcacctgcccacagtgggctggggcctcctacatcaagcattaatctggaaaacatcccacagacttgcctgcaggccagtcttgtggagacatgttctcagctcctagataaccctgcctaaatttttctgatggagctgcctaggccccttcttcctccttgttaaattttttacattatctgtatctgcctccatgtgtttgtgcttttgagaaattgggagcattgccccatttctgttgtatttaagctgggactagaatatccttaaactggaagacatcctgatgtgacttgatacatccaattcaaatcctgggacatggggatgttgtatgctgtgggaggttggggccttaggtcttggggacacgtgatgctccatgtgagtttctgtctctccaggttggcttcaaaaatatgcagaatgtagagcacgtccccctgacgctggacagagccatgaggctggtgaaagatgtcttcatttctgcagccgagagggatgtgtatactggagatgctctcaggatctgcatcgtgaccaaagagggcatcagggaggaaactgttcccctgcggaaagactgacatgcgggtcatatattggagctgtggcacaagtttgttttattaaaaagaatgtaaagtactcattttcttacactgtgtcttctctaagcatggcaaattgggaagaatttcttccttaggggtcggagagacaactctcagtttaaaaagtatggctcttgcagaggacctaagtttgattcctagcacccacctgtaactccagttccaggggctacagtgtcctcttctggcctcgacaggcacatgcaaatacccacatacaaatgtatgtaatgaaaaataaaaccactaatataatttctttttctttatctggatatatttatttattttgagatttacttttcatcatgtgtgtgtttccgtgagcatgtgccacgtgcatgcatatttatgtgaacagggtatgcaggtgcccagggaagccagaagcaggcgtcagttcccttagagctggagttacaggagctatgagctgtcaaatgggtcatctagaagagccacacacttaactattgagccatccctccagccctatatttttgtattttaagaataaggaaagtgggactaaggaggtggctcagtgggtgaaggtgtttgccaccaagcctgacagcttgagttctgacccttggatctctgtggttaatttgttttctggctaatacatacacatcttgttttttaagatttgtgtgtgtgtgtgtgtatgtgtgtaatcatgtgtccgtatgcacacagaagccagaggatggtgttgactcctggattggaatgagaaaccctatatggatgtcttcagcattaggattttacatacatttacatatcatttacatccacacttacatacactattttgaatacatgtggacatgcaagtatctctactgggatataagtttctttgggtatgtgtccaggaatggtatagctgggtcctataaaacctgtttttgcttttttttaataaacttctgttctgatttccatagtggctgcactagttgacacaccaacaatgtgtgactttacccaagtcagtgtcagtacttgtcatttgtattcttgatcattttgtttgtttgggttttttgagacagggttcctctttgtaacaacctctggcagtcctagaactcattcagtagaccaggttggcctcaaacccagatctgtttccctctgtctcccttcgagtgctgggattagagatgtgtgccgccactgtccttttatcttcttgatgatgttcattctgactggtgggagatggaatctcaaagtggttttaacctgtatttctctgaatgctaaggatgctaatttttaaagtgattactacctgtttatatttcttttgagaaactttgcttatttctgtcctggttagttttgttttgttttgtttgttttgttttgtcacattaacagcctggagtaacatgggaagaagaaaccattatgacagactttatgcaaccagattggtctgtggtcatatctgtaagaaatcatcttgattgatagaggaggccctagcccactgtggacagcactaacattagggaggtgaggcttggtctgtataagaaagctatctggggctggagaaatgtctgactgttaagagtctgtttctatacttgattttcagagcccgtattaggtggctcacaacagtcagttccagtggatgcaacacttttctggcttccgtgagaatctgcacacacatggcacacacagaggaacatgcatgcacacataagttaaaaaaatatttttgaaaagtgcttgcagcaaagaaagggaaagaaagctagctgagcttgagcctgtgagcaaggcagtaagtggaatttttccaggattcttgtcccaggctcttgccacctggtcttttctcagtgatgcgttgtaaccttggagtgtaagccaacgggttctttcctgtggtgctgcggtatcacagcactgtaatgaaagtagaacagaaactcgcaccaagagtagcgtcgttgtgatgaacctgtgttcatttggaggagtggggaaatgtttggaacttagagctggaaaagccattgagtcctaggaacttggtgagttgttcagtagtaacttggaagatagtgctatgaaaaacatggaggctatgaaggtggattgtgatgccttcgaaggaagaaagatgatcggggccatttggattaagaatctgtggttgctttttagttaggaatcatttgtgattaacaagataagcagcacccgttagatgaaagctttgagttttactaggacttggattctggtcatctggggctgaaaatcagctgtggttaataagaaatcgttatcattgaaataaaatctggaaagtatctattaaggataagcacacaaactgatctagtggggtcaagtctatctcaagctgttagctgaatttggcaaaatatctgtaagagtcacccacctgttactggttttaaaggcaggaaagctcttgattgaaggggtcataaagagaagctgaggactggcaccctgttgcagggttggggtacctgcagagaggcccaagaagctattggtgaaggcagaacatgagttgtagcagatattggagcagctcggacctgggatatctgctaagaacagtggtaagtgtgggatgaatctgacctgagcctgtactaccaccatgtgtgctggggacagcagagttggagagccctttagagcccagaagagtgtattgtaaaaggacaagtggacatgatagacattgatctatacagctagacttcggttttgcttaagtgtgttgtttatgtaatttatctttttccactgaagcccatatttaagggtctttgggtttatgaatgaatgaatgaattttgtgacaaggtctctctatgaagctttagttgacctggaattcactatgtagaccaggctgggctcaaactcacagagatccacctgcctctgcctcttgagtgttgagattaaaggcatgtgctgccattcccagcaagactagatttaaatttaaaagagaccttgtactttttaaagagttatttatttttaatgtatacgagtacactgtcactgactcaccagaagagggcatcagatcccattatggatagctgtgagccaccgtgtggttgctgggaattgaactcaggacctctggaagagcagtcagtgctctcaactactgagcgatctctcaagcctgagactttgtactgtttttgtttttgtttttgtttgtttgtttgtttttcgagacagggtttctctgtgtatccctggttgtcctggagctcactttgtagaccaggctggcctcgaactcagaaatccgcctgcctctgcctcccgagtgctgggattaaaggtgtgcgccaccacgtccagcctgagactttgtacttttaaagcattggaattttaaactttagttttacttgtaagagggaggcgggggaggtgtgtgcacatgagtccaggtgcccttggagaccggaagcatcagcttccctggatctggagttccatctgacatgggtgctaggaactgaactcagttcctctggaaatgctcttacctgctgaagcagctcagttaaaaactttagacaggtttttaaaattgcattttataaattgcattttactaacacgaggaaatggtgacaaacaagtagaaggttatggtttagcagtggttggtttgtgtgctaagttggcaaggagggaagcagcctgactcatctgggaagagggactcccagctgaagagttgcctggatcagactgggctgtggctatgtctgtaagagatccatatgtaagggctcagcccactgtgggcagcagcatccctaagtatgtaggcctgagctatataggaaacgtagctaactataaggcccagaacaagctttagaacaaaccagtaaggagtactcttccatgattcctaccttcaggtcttccttgagttcctgccctaacttcttccaagagactgaccgggaggtataagccagataagttctttcctccacaagcctttggtcgtgatgtttaggaaagcaacagaatgaaactaaaacacttccataaccaactttttaaaattaggatatggggctgaagaggtgttaagaacacttatcagcagttaacacctgcttttccagaagacccgagtttagttctcagcccctgcatggcaactcgagaccatctctaacttcagacccagcggatctatactaccttcttttgggatatgtgggcaacaggcatgtatgtggtatatggacacacatagaggcaaaacacctgtacacataagcaagaaaagtaaaaaaatgggttattttaaaatttaatgggtttgtgtacacacacacctgcgccatagtgcaaatgtagaggtcagaggacaatatatcagttctctctttctactagatggaccctggggatggaacatgggttgtgtggccatttccttattgatacattccaccctgcaagtaagtaagtactttaagacagaaggtaaacaaataacttaaaatccttgaagggagtccctggaactgaccagattcactaagatcccccctccatgattaaataatacagacggttgagagttactctcagacaaagcaagctacaaagaagactgtgagactagaccagtcacctgttgagctgcctgcaggctctacagtacagtatgatacaagtttccagcttctatgagctgtcatctgtgctggagtgggctttggttatgcagctgtctttgagtcatttctcctcctataagtaactctttacccatattctcgtaaatatcctcaataaaattcattggttcaccaagttggacttgtctactgagggcttcctttggatggtgaggagatggtaggttgcctgcttcccctgtgtttttgttgtcactgtgttctagttaatgaccctctgtcaactgtatagcagagagtttctaccgtgagctgctcttcacttggttgacttttctttgttgtacggaagccttttgttttctcaagctctcgtttgttaatatttagtcttatttcccgtacgactgctgtcctagtcataaagttctctatgcctatgtggtgacgtgtactctctttaaaattttttattttgtgtgtatgggtattttgtctgcatgtttgtccgtgtaccacggaagccagaaggcatcaggccctgtagaattttatatgcacagattgggagacactttctggatcctgggaatcgagcgcagagcctcggggagagcagtcagtgatcttaatcatctgaatcaactgaatcatctctgactccatgctgcctactttttgctctacatgcttcagagtctcaagattctatggtgaggtgttaattctatatacatttcccagcagtgcttgctaagagattgtcgtttctgcaatgtacatttttggcatccatcactgttgaaaccaggtggctgaagatgcatgttcttagatctgggctttctattctgtccatctagatgtctggttttgagccagtaccatgctgtttttattactgtggctctgtagcatagcttgaagtcaggtatggtgatgccatcaactgttctggttgtttggcaatcttctgtgcttccatattaattttaagattttttttgtcctctatatccctaaataatcgttctaggatttttactgaaattgtattgcatctgtgttttaggttgttagagtttctattactgtcatgaaacatcattaccaaaaagcaagttggggaggaaagagttaattcggtttgcactcctacagcactgttcattattgaaggaagtcaggaactctaaacaaggcaaggttctaaaggcgggaactgatgcagaagccacatggggagtgctgcttactgacttgttcctcaagacttgctcagcctgcttccttatacaacccaggaccaccgacccaagcatggaaccacccacaaggacttgggttttcctacatcaatcactaattaagaaaatgcctagggctagagagatggctcagtggttaaaagcactgactgttcttccagagatcctgagttcaagtcccagcaaccacatggtagctcacaaccatctgtaataggacctgaaggcctcttctgtctgaagacagttacagtgttccattcataaaatacatttttttaaaaaattcttttaaaaaaaaagaagaaggaaaaggaaaaggaaagaaaatggcttatatcggggtcttatggagatatttccttagctaaggttcccacttttcagaaatctagtttctgtgtcaagttgacatgagacaagccagcacacatctgtattttgctttttgtaagatggctatcttgacaattttaaattcttctaatccatatacatggacggtctttctatcttctcacttcccccttagttcctttcttcagtgtctttaaaggttttcttgtagaagttctgttgtttacttagttaagtttattccaaccaaaatagtgtgagtggagtggataatatctcttatattaaaactatttcatctacaaacaggaatatttttactttcctatttgtatctattttttcttactgctctgagactcaagcaccgtattgaacaggaatggagaaagttttatttttattttagtaaaaatgcttcaaatattttttacctttaccataatgttgttgtggcctcgttgtatattgactttattatgttttgaattatgtcccctatatccatagattctgtagcaaatatctcatgaagagatactggactaatcaaagacctttcctgaatttatttggtttctgtccttgagtctatttatatgacaagttacatttattgatttatacgttgaatcttctctttaatgaagtcaacttggtgctgaatgacgagatcttgaattagtttgctagtatcctactgagaacgtttgtatctgtattgatcagagagatcagtctataattttcttaatgttgtctctgcctggttttggtatcagtatgatattggcaaaagaaaaaaaaaagcaaaaccggtttggaagtttccttccttttctactttatagggtgatttgcaaaatactggtctccattcttgagtgaagggtagagatctatacagtgagtacatctgaacctgggtgttcttcagtcaggagatttttatgaccatgtcggtcttgctgctggatataggactatttaattttttttcattttgatttgattttggtaggtcatatacctatcaatttcatccatttctcttagattttaaaaatttagtggaatataggtttgtaaggtatgttttatgcttttcttactcttggtatctcttgtaataacttcttttttcatttctgatcttacaagtcttctctgtcttttagttaacttagctaagggtttgtctgtctttttaaaaggtttatttgcctttttaaagaaagaactctgcatctgattctttggtttgtcttgtactcactatttctatttcatgaatttctgcccttaagtatgtctccttatctactgatttggagtttgatttgttctgacttttctaaggcttcaaggtgcatcattaagttatttgagttttctctgtttttttatttttaaaattttgggcgcttagagatacgcactttcctattaggaccgctatttgttctcgggtggatctctagaacttgtgaatcatctttagaaaatttttcttccatgacaggcaagtatttagaacttcatttggagtgtgggctgatgactgtaaggcggattgttggtaaacaccactgttttgaactgggactccactgtcacctcaagcagacccctgacctgactcctgctttgagatgtgccacaaagatggctgaggcctgtcaaaggatggtggctattcctcattcatgaatgccaggttctgtgtcacgctcctggaggaggccaccaggtggcgctgtggatttacctctggtgcccccactttgtggcgagcatttcctaggatagagtttagtttgtggtaggcaggaaatagaacttgagtccggtagtaaatactgttcttccttaacttggcaaaaggacattttgtggtaacttgtaatctcagttcatgtacatattaaactgcagaggacagaagaagataaactggtcatcactgtactggatgcatgcgaggtgtgtgtttgatctggaggggagagaaaagaagacagaggaggaggagaaagggaactgactttgacacaaaaagacaaatatcagaacactggatttatttggagctatatacttgtaaaagatgggtctcactaggtatatagcccccgctgacctggaactttctatacgtaccaatttcaaactctgagatcttcctgcttctgcctccccaagttctgggattaaaggcatgtatcatcaggccctgtgattgttttttattttttattttaattatttctaaagcaatagacagatcctatttttcttctacattctcaactctcctattggtattgtacctgctttttagagtaggttgttgagaatcaactgtgacacctagaaggtaaggacatggctgggctgtggtagtcttaccaaattttcacgtcatttagaatattaggaacacacatctacagagcccaaacatgggctagctccaggtggcaactataccagcctgttcttctgcccttgggagtacagctttcatagtctggaattttctcccatcatggcaaagcctacacaggacttgctagcattttgcactccaggtggggctcaaatgttttagacttagcacaacatcccctggaaattgtactttctttgtaaagcttctcagtaagattgcttactgtttgcagagactctatgaaccactatgatccacaaggagagactaggaggaggttctaagcagcggttgtggaacgcatgtgaacagcaaagctgttgacacgatgtttctgttctattctgtaaagaatgtgttcgtgcatatagacataaagcagatgcttgggttttaaaaacgttcctctatttctttcttatttttaaaaaagattttatttatttatttattatatgtaagtacactgtagctgtcttcagatctcattacaggtggttgtgagccaccatgtggttgctgggaattgaactcaggacctctggaagagcagtcagtgctcttaaccgccaagccatctcaccagccctcgttcctctatttctttatcgtgtaatgaaacataaactgagatggcatcactggtcattatcatatgtaacctacagtcacaaagagaccaggtgttcctcaagggacagcgataccttttctaaaatacataatacattttcggttgtatttgagaaagttatatcatattaggtagaattatgacctgattatagctttcctttgggaattaagcataacagaaggatatgtaatttgtgtgtcaagttgacccagggtatacttgtgatagctaattttgggttgttaactgcatctagaatcaattaaaacccaagctcctgggcgcacctgtgagagactcttgattggatcatttgaggtggggagaccaatggtaaatccgtccgatactttctggtggcagtgcacataaaaggccgcaactttaacctttcccaggcttgcccccactctccctggcttgcccccactctccctggcttaccacctacttcttcctgattccaacactgactgaaaaccagcagctctccaggaatcctcagggactaggttaaaactaccagattaggactaccaagatatgtagaacaacaactggtgtacatacacacacacacacacacacacagaggcctgatatactgaccaaatgttggataatttttcaattttatagtccatatatcatctgtctttaaattttagaacagctcataaataaatgtagtaatatgattattaataaataatatatatattcattcttttatcagttctgttcccttagagactctaactaatagaatggcaatagaaatggctgagtaactaatattcactacatggaatattgcgcagc

SEQ ID NO: 372 - DNA, 1055 bp, Mus musculus
cattttgccgtgagacagcaggagttaggcgcgatgctttccactgctgcttaccgagacgtggaacgagagctgggaatggggcctcacggctccgccggccctgtgcagctgcggttttcgccttatgccttcaacggaggtactgtattggcaattgctggagaagatttttccatcgtcgcttcagacactcgattgagtgaaggattttcaattcatacccgagatagccccaaatgctacaaactgacagacaagacagtaattggctgcagtggtttccatggagattgtctcactttgacaaagattattgaagcaagattaaagatgtacaagcattccaataacaaggccatgacaacgggggcgattgctgcaatgctgtctaccatcctgtactcacggcgcttcttcccttactatgtttacaacatcattggaggacttgatgaagaaggaaagggagctgtgtacagctttgacccagtgggctcttaccagagagactctttcaaggcgggaggctcagcaagtgccatgctgcagcctctgctcgacaaccaggttggcttcaaaaatatgcagaatgtagagcacgtccccctgacgctggacagagccatgaggctggtgaaagatgtcttcatttctgcagccgagagggatgtgtatactggagatgctctcaggatctgcatcgtgaccaaagagggcatcagggaggaaactgttcccctgcggaaagactgacatgcgggtcatatattggagctgtggcacaagtttgttttattaaaaagaatgtaaagtactcattttcttacactgtgtcttctctaagcatggcaaattgggaagaatttcttccttaggggtcggagagacaactctcagtttaaaaagtatggctcttgcagaggacctaagtttgattcctagcacccacctgtaactccagttccaggggctacagtgtcctcttctggcctcgacaggcacatgcaaatacccacatacaaatgtatgtaatgaaaaataaaaccactaat

SEQ ID NO: 373 - protein, 238 aa, Mus musculus
MLSTAAYRDVERELGMGPHGSAGPVQLRFSPYAFNGGTVLAIAGEDFSIVASDTRLSEGFSIHTRDSPKCYKLTDKTVIGCSGFHGDCLTLTKIIEARLKMYKHSNNKAMTTGAIAAMLSTIKRRFFPYYVYNIIGGLDEEGKGAVYSFDPVGSYQRDSFKAGGSASAMLQPLLDNQVGFKNMQNVEHVPLTLDRAMRLVKDVFISAAERDVYTGDALRICIVTKEGIREETVPLRKD

SEQ ID NO: 374 - DNA, 90086 bp, Homo sapiens
ctatagctggctaacatcatccctatacatatacaaaattcttcacatgatcccaatacaatacatatataacttagcttattttatagactgctgtactcccagggattcttatatcacagacactcaataaaagatacaaaacaatgcacattttactttagatcttcattttattggtgtcaaggaataagcataacacaaactctttgatatacagattttttttttgaggcggagtctcgctctgttgccaggctggaatgcaatggcgcaatctccgctcactgcaacctctgcctcccaggatcaagtgattctcctgcctcagcctcccaggcgcatgccaccactcccggcaaatttttgtatttttagtagagacggggtttcactatgttggccaggatggtcttgaactcctgacctcagatgatccgcccacctcggcctcccaaagtgctgggattacacgtgtgagccaccaagcccggccaattttttttttttttttaagagacagggtcttgccatgttgcctgggctggtggtgaactcctaggttcaagaaattctccttcctcagcctcccaaagtgctgggattacaggcattagccactgtgcctggcctgatctacagacatttgttttatagcgtgaaatacattaaaatatagagacacggcagaggagacaaaaaagaaaaaaaaaagaaatacattaaaatagatctaaccttgggattatattcggcgtttcgggcacgaagtgcaatggtctttaggtcaagtttacaaccaagattcactgtggatacaatatttctgtaagagatttaaaaagaaaacacgactatttaaattacttaagtttcattggatgaggcgttagaaattatgcagacatctgattatttcaaccaggctttacttttttttaattgctcacatttattgtttaacaagtatcatgcacatgttgagcattttatatagattattccatttaatacatataacgcactgaggtagaagttaccagtattcccacatttggataaataagctgaggcttaaaggtagagtgcaacttgctcaggacgcaatggctcccaagtggaggagccaggatttgagtctgtctgtctccagagcctgcccttagccttctcacagacaaactcaattctcatctgtgagctctgaaaagctaccaccaccaccctattcctaagtaactatttataatgaaaacaagcaggcatgaactgcccagttctctcaaagtaagtatcttttgaaaaacaagagctaagtgtctttagcaaaaaaaaaaggcaaaaccctgctttctcttctaattaactctcagtaaataaggataaatggagccatctgggtccactgacccttttcatttctcagtgttcttaaatcacttaacgaataacttatacaaggataaagatatactaaaaagcaactctattagaaattttaataaaaatttaaacaacaaacccacattttcattatacatttttctgcttatgaaagtatatatagttgaaatgggcaatgccctttgaatgcaattaactgctcaacaactgtctcgcatggacctggaaatcaccatcccaagaatatcgagtccagatttcaaatacataggttcaaatacaataggtttcagctcattgttgcttctggttctttttcttgtacagtctatgatacacaactgtaaagccaattaggttgatccacacaatgaatgttttcatttccatatcatctatttccttccaatcacccttgtatacacacctgcctttagcatttgtccacttatgaactataccaagtagattttagtatatctatcacaactttagtcacataattgttaaatgtattcttatatattttcattaattaaatatttaccttaatccctcttaagcctacaagatggagagggcactgaactaccacccgggagggttcttagtagatagtggaaattcaggaatgtggatgactggatgctctggggagtatcagaacagcaaaggcactcgcaagaaacaaacacctgactgtactgtttataatttattatttaaatcagaaatgcaaacttaaatattcctgggagtcagacaagcatgctggacacatgggagtggtatagacaagggtgagctaaaaagggctctctctaaaatcactaaaattactttgtttttaaaattgtgtgtggggtcaaacaaaattgtggaggcaagatttaggtctttgggtgaaagtcagcatccacgattacacaccacttagttccaaaaatgatgagagatagcttataaacaacaaccatatatgtaacaaggtgaataaatgcaaataggaaatactagatctaaagggagtatgaaggaggaaggtatctgtacaagaaaactgaggagatgcagagactgcaagtaaccttttaatttggtcataagctttctaaaatgaaaagctatacacttcttattgactggaattatttggaaatatttgctggtttttcaggaagatgaaattatttcctacccctactacactgttacatatagaacccacttcatttaggtagaaaaatccatttatgacaaaaacagtcgtcttcattttgtgggaaggacacagaccttcaaagatttatatgcagcacccatagtaaaaacaaaaaacaagaactaccagaaattatactgatattgtgactaaagacctaaaatagcataagggaaagagactacctaacattgtgatttagcgatatcagatacagggaaatgtctataatataataacaacgacagtgaaagtcagattaaattttattggctcaggtatgtaaacacaaatgaccacatttctaaacctgttaagagccttttactgaggacactgactaagatagctttgcttccctttcccaaatgtgagataaagcaaattttgatacacaattaccgttagtgccactccctcccttaataaaaggatccatctgaaaacagagcaggaacataactcaaagggactcctaagtgggaggaaacataaaacacgaagtactcactgcagctgcggtacaatcccagaactctccgaagctggcgtggcaggagtgatgggggtcatgggagtcatgggggagggatacagtggagtggtgcccggcaagggtgcagttgtgagagtctgtgagtggaagagctgtggtgcctggcctgaggttccctgtgttgcctgctgggacgttgactgctgaacggctgcagctgccactgcctgttgctgctgctgctgctgctgctgctgctgctgctgctgctgctgctgctgctgctgctgttgctgctgctgctgctgctgctgctgctgttgttgttgctgctgctgcctttgttgctcttccaaaatagacagactattggtgttctgaataggctgtggggtcagtccagtgccataaggcatcattggactaaagatagggattccgggagtcatggcaccctgtggaaagcaaggagaaaaacaggttaggctggctgctgctaagtgtttgtggaactttcttggtggaacagcaggtcaggtgtgcaaagacagatgccttcggagaataatggggttattaaacattaattacggaagaaccagctattcttatacacattgctttcttctttaataccacacagtggataaacatgaagaaaaatggataaactgaacttcggaaaaattaaaaacttctgttctttgaaagacaccattgagaaaattaaaaggcaggccagactgggaaaaaaatacctataatacatacatctgagaaaggactggtaaacagaataataaagagctctgacaactccataaaagaagatcaacaaataaaataataaaaaagggcaaaagatgtgaaggacatattacaaatgaagatacaggcatacctcggagatactacaggttaggttccagaccatctcaataaagcaagcggcatgaattttttggtttcccagtgcctacaaaagttatgttagcactaaagtctattaagtgtgcaatagcattatgtctaataatatgtatataacttaatttaaaaatgctttattgctaaaaatgctaacaatcatgtgagcctgcagcaaatcataatctttttgctgacagaggatcttgcctcgatgttgatggctgctgactgatcagggtggtagctgtggcaatttcttaaaataagactgacgaagtttgccacactgactgactcttcctttcactgaagatgtctctgtagcatatgatactatttgacagcattttacccacactagaacttatttcaaaattggagtcaatcctctcaaaccctgctgctgctttatcaactaagtttatgtaatattctaaagtcatcagttcttcaccaggagtcaattctatctcaagaaaccactttctttgcttactcacaagaagcaactcctcatctgttcaggttttatcaaaaaattgcagcaattcagtcacatcttcaggttcacttctaattctagttcacttgctatttccactacacctgcagtaacttccagcactgaagtctagaacctctcaaagtcatccacgagggttggaatcaacctcttccaaactcttattcatgttgatatttcaccctcctcccatgaatcatgaacattcttaatggcatctagaatggtgaatctttttcagaaggttttcaattcactttgcccagattcatcagaggaatcactatctatggcagctacagcatatgtccctccctgcttcctttctttgagacagggtctccattgtagcctttaacttctggactcaagtgaccctcccgcctcagcctcccaagtagctgggactacaggcacatgccaccatgaccagctaattaaaaaaaaatttttttttgtagcaacagggacttgttttgttacccaggttggtcttgagctcctagctttgagtgatccttccaccttggcctcccaaagtactgagattacaagcatgagccaccatgccctgctgtatttcttaaatagtaagaattgaaagttgaaattactccttgatccatgggctgaagaatggatatattatttaagcaggcatgaaaacaatattaatctccttgttcttctccatcagagcttgtggacaactagttacactgtcagtgagtaatattttgaaattaaactttttttctgagcagatctcaaagagcttaaaatatccagtaaatcatgctgtaaacagacgtgctctcatcaggttttgttgttctgtttactgaggacaggcagagtagatttagcgtaattcttaaggctctatggttttagagcagaacatgagcattggcttcaatttaaactcaccagctctattagcccctaactagtcagccagtcctctgaagctttgaggctaggcactgatttctcctctctagctataaaagtcctagatagcatcttcttccagtagaaggctgtttcatctacattaaaaatctattatttagtatagtcaccttcatcaattatctcagctagatcttccagataacttgctgcttcatgttgcatttttatgttgtggagaaggcctctctccttaaagctctgaataaacctctgctagtttcaaaactttcttctacagcttcctctccgctctcagcctttacagaattgaagagagttaaggccttgctctgtattacactttggcttaaggggatgtgtgggtggtatgatcttctatccagaccattcaaactttctccatataagcaataaggctgttttgctttcttatcacttgtgggtttactggagtagcacttctaatttcctttaagaacttttcccttgcattcacaacttggctaactatttggtgcaagaggcctagcttttagcctgtctcagctttcaacatgccttcttcactaagtataatcatttatagcttttggtttcaaatgagagatgtgcagctcttcccttcatctgaacacttaattaaaagtcactgtaaggttattaattagcctaatttccatattgttgtgtctcaaggaatagggaagaccaagcagagggagagagatgggggaatggttggtcacgctgcagacatttatcaattaagttcctgtattatacaggtgcagtttatggcattcaataataattacaatagtaacatcaaagatcactgatcacaataacagataataatgaaaaggtttgactaggcacagtggctcatgcctgtaatcccaacactttgggaggccaaggcggatggatcacttgcagccagtagtttgacaccagcatggtgaaactccgtctccactaaaaatacaaaatttagctgggtgtggtggcgcatgcctgtaatcccagctacttgggaggctgaggcaggagaatcgcttgaacacgggagatggaggttgcagtgagccaagactgcaccactgcactccagcctgggcaacagagtgactgaaaaaaaaaattaaaaaaaaaatacaaaaaaaaagaaaaaaaaaagtttgataacaataacggataataatgaaaaagtttgaaatcctgcaaaaattaccaaaatctaaccccaagacatgaagtgagtacacacttttggaaaaataatgccaacagacttgctgggtacaggtttaccacaaccttcaatttgtcaaacatgcagtaaagtgaagtgcagtaaagtgaagtgggcctgtgtatgagtggctgacaagcacttgccaaggtgctcagaaacattagtaatcaggcaaataaaaatcaaaaccacaataagatactactaagcaatcactagagtgaaagtaaaaagactgacagcagaaagtgttggtgaggatgtggagcaacttaaatctcttatgctgcaaaacaatacagccacttcaaaaaacagtttggcagtttcttataaagttatacatataccaatataggacctagcaatcctactcctaagtatttacccatgagaagtaaaaacagtgcattcaaagtctacacatatgtttacagtgcttttattcgcaatagctccaaactggaaagaccccaaatgtgagcaactggagaatggatgaactgtggaacatccaaacaatggagtgatacttagctatacaatggattaactactgatatacaaacagtatactgggctaagaagtcagacatacacaaaaaagcatacactctgattccatctatatgaaattctagaatagacaaaactaatcttcagcattgaaaagcagatgcagtagttacctggggccagcagagtgactataaaggggaagaagggactttttaaggtaactgaaatgttctgtaatttatacattatatataattatcaaaacagacacttaaaatgagtttttttgtatgtatatttcaacaaaagttattgatttttttttttttttttttttttttttgagacagagtctcgctctgtctcccaggctggagtgcagtggcacgacctctgctcactgcaacctccacctcccgggttcaagcaattctccttgcctcagcctcccgagtagctgggattacaggcacccgccacaacacctggctaatttttgtatattttgtagagatgaggtttcaccacgttggccaggctggtctcgaactcctgacctcaggtgatccgcccaccttggcctcccaaagtgctgggattacaggcgtgagccactgcacccaggctgaaaaatttttaaagtagatgggtggttgagagcttgaaatgtaaaaggggaaaaataaaactagaaaataatttggtgagggtgattttcaaaatcaaagaccctatatagtcatttggaacattctcataagtgtttatcaaaagattaggtgtttcataaatatataacttagcttccagacttcccaaataaacaccattgtgcctattcaaagcctaatagaacttctcaacaaaataaggcttaaaaaacatattaaaccattttcaaaaacagatcattaaatgcccttccttgccttttgataccatctcttgcagttcagatttccgccctccctattctctccctcctgctatattacctgaggggaggccaagccctgagcgtaaggtggcaggctgttgttctgatccatgatgttcactttcttcttggcaaaccagaaacccttgcgctggaactcgtctcactattcaattttttcctagagcatctccagcacactcttctcagcaacttcctcaattccttgggttatcttcacacgccaagaaacagtgatgctgctttggaaaaaagtctaaagtttaatttaaggatccaggtaacctgtacagtcctataagccagttctatggctatacaaaacacaaacatgaaaaccaatgaagctattttggaatacatttgtttttaccttataatcctaaagttttattccttccatgtttccggcgattgcatgtaaaatcgccaacaaaacaaaaatcattttgttacatgtttaaataatcggaaaatgctcaaaatcgagctgtcataaccagcattaaaaacttttgaggaaaaacacctagagaaaaataattcctaagcaaaatgtaatatcagagcagaatattcactaagcactgtatacacagcactgttaggcaaagtttagatctttaaatattccaattttacatcctctacaatgtcttgggcaaaaaattaagtaaatatcaaattcaatccaatatacttcagagtgatcatttatcaagctcctactgtaatgaaactgtaaaaaaaaaaagccgcacaaagataaagccctgaatttttataaatgtaataaccttacctctttagaacacattaatgcaaactgtgcctgttatctgacttttcttaaatcatcatcgctttactcactacacatctgaaatgagtttataacaacatattctcacatagaacttagaggtctcaaagttacaaattatatgtccaaagatccttcaggcatatgcacttcaagcatgtgctggtacagaacagacactcagatatttgctgaatgtatgaaagactctgacgatcactttgaaagggcaaaggcccccaaagactatctatcctacatactcatcactgaaaaacagaccaaaaaagaaagcaagctctgcttctggaaataaatatatcagagatattttttaaaatatactttttttttgacagttatcctataataacaataacagaagtcctgcagatgaggatataaagataggaggatatagtccttggcatcaaagtgttcaatatgaagggtatgcaaataactactgtaaaacatagtattataacagcaggtatggtctaagctaagttccttgaatgcagaaaccagcctacatgtctttgtgatctctgcatctagcactatgcctggaatacagtatgtgatcatgaatgagcccatatacacccctggaagagaagacaatatagactaacagccaatcactgtgaagagagcgcagtgttttcacaaagcagggaccatctaacttgggtctcacaaggtgagtaggaatttacacatcagggcttcagacaaaagagaaatcaagcagaaagagacagattgaaaaagcatgcagtatgcaggcgacaagcttagtatgactgtatagaaggtcactgcagcagatgagacagcacatattggtgggctcatactatcaggagttttcaatgttattgcataggcaataataacagttatggaatttcggaagtgcagtatgaacagatctaatttggcaagactagatgaatttgagaggagtaaaactggaggacggaagtttcgtttcaggaatctaaggttgaggcaagagataatgacggcaggatttaaagccattataagtatgattagagatttatccaggaccttcggtggcttcaggccactttttgcaagtaagtctacagaagaaaccgcacagtgattactgcactaatttatcctcagaaaagagttgtttgctgggtatcttcatctcctggaaattgaaacatcaaatccgatattttttggaggcaatcaaattaattctgcatagccttctagtgtctgtataactaaatgaagcacagtcttttcacagaaaagtctacctagagatttggaaaaccatgatggcctgaaccgagagacgggagaccctgcaaataaagtggtgtgtattatatcttaagcgctaccgtgcccgctgtctcaggcttctgacaaaatatttaagtctcaatgttggcagcaaaacaggcgggcacagatctgggtgaatctgcttctaacatggagaagaagcggatggcaggacagggcagggtaaacttagggtcttcgatgcaagggactgtcctgtcccgcctgccgccgcccagccagccagtagtaccctgagccccacaatcgtacgatgggaagctgcctgcgaaacacagcagagtagggcaccaggcgggagtggcggccgagtggccgttacaggccggaacggcggcagcacgaaagggaggaacgtcccccgaggggcctgcacgcgcgccaattcctagtctcttccccaccattgcccccaggcctcagtgcagtggtggccttcgcccgaaccgtcagaaaagagtacaatctgttacctgggtcactgcaaagatcactatgggccagcggaagcgaagttaaacagccggcggcccaggcgcccgccacagcgaacctgcccgacctcactgaacccctggcgcgcgttgataatgtcacttccgccagttctgccctcggcttcagcgagttgctcccactagggccgaggccatgagaagtgtgagcataggtcacttcctgtgtttccataggtaaggaggggcgaagctcttgaggagttccggggcggggccgccgtgccacagccatctctaattggcccttgctggacgtaggaaagatcgatttttaaatggcgtgtgtgtgtatatgtgtgagtgtgttttgttgttgttgttgttgttgtttaaagcaactagcggcgttaccttcgacaagttacctgacctctcccccgcattttttttctgtaaaattgaataatgataacagtgcttacccttgggctgtcgggagattgacagagattgacagaatcagtgcctgagcagtgcttggcactcagtaagcgcgtcctccttacctgtcagcaagaacgctagctgatcttcaagcgtgtagaatgacaaggaacactaagcaaaacaaacagcttgtgtttacacatgcatttatattcagttctgccactcccagttcatgcactgttgtcacatggctctttccgcagttgtttcttagtgggacttcagcacgccttgattttcccttctgtagttcattgtggcgtaatcatatgttatactgcttgttttctttgtactttttattatcagtgaggttgtgagctctttaaggataggaaatgttatatacattttttattagccaggacaattaacgttcccaccgttattcgagttgccgttgcgccatagttctgacaatttttttgtatggtcagacttaaatttttgtccattggggtgaattccaatgttttcttcgagggggaaaaaaacaaaaaacaaacaaaaaaaaccctttacatccctgtcagcgctttttggaatgggcgggattcaactaccaaagggacaagccgccgtgcagccctccaggagcaacgactagcgtgagatagagaggccgggagcgaacttcaggagaagccggaagtggcgtaacgtccggtcaaggcagccatctcgccgtgagacagcaagtgtcggatccgcaggcgcagccgtgcgatgttgtcctctacagccatgtattcggctgctggcagagacttggggatggaaccgcacagagccgcgggccctttgcagctgcgattttcgccctacgttttcaacggagggtaaaaaccccagagagctgcggctttcactttcgcccttcccccatctgctgaagcctatttaggagtcaccgccgtgatggcgctgccccgggctcctgcaggcctcagaaccctgagctgagggggtccgcacaaggccggtctccctgccgtcctctcatgcgctgtgtttccctcttcaggctcgctttgctcaagtttacttggtgattgcgatacagccttggtttttagggtttcccattacagtcatgtcatttgagtttttatgtggaccgccactccgtgctccttgctgctgtaagacagtaaagtagaaattgaaacatagcctctgctctgtggaagaccattaaaactggacctcatgtacacgtttcttatgccagccggcgagggtagagggttagcgtctgaaacttaaaagttagggttgtttggtctgtgttgttagatgcatagctgggttggtagccgagatgtctaattgtagccgcctgatttctgttatttctaattgtagcagtttaatcattttgttttatttcaaatagaaggtgggattggctgagcaaacttagtttcatagataagtgcttttttttttaacgtttagcttaagttcaggaaaacaaaatactcagaagatggaccttttagtatgtgtgttcttgtatgttatgttcaagttttggtttttattttaattaccagctttatcttgagtagtataattttccgtggtggcacgccagagatttagggttatagaaagatgctctgtttaagactcttgacagggaagagctgtaaattgaaacagtggttatagttaccaatcaagccttgtacattaaaatatacacacgcaatttgaacgaaccgatggttcttaaaacagaaaatattggctgggcagtgtggctcgcacctgtaatcccaggactttgggaagccaaggcaggaggatcatcgcttgaggccaggagttgaagaccagcctgcgcagcatagcaagaccccatctctacaaaaataaattttaaaaacaaagcaaaaatgttaattggttcctcataaatttgaaatataaatgcacattttgggagtgtgttagaaagataacgaaagtctgattttagccttggttctgccactaaaggacactttgggtacttctgaacttcttgaacctaaatttccttatcttccttagtagcttcatagtttttggtgagaatcaagagagatgcattttgtaaattgcaagctgtcatcttatttaatcctcatgaaaagtgaatgttagatgatattagcatcctagggttatattagacgttaaactgtcagggtcagagagctggtgtgaagttgagccaggacttaattcatagctatttcaccactgagtttatggatgcttttccattatacaccttaacacttcctgtgatgactaattaagttgtatattgtagggagggttattggacccgtttcgtaaggctattctctataaataagaattttcagtgttcagtatgccctactcgttactcactttttaatcccttgtaatccagtttaagccattactgccctaaaaattacttagatctttctgattactttttctcagtcattgttctttttctttagtgattactgcagctggctctcaggcagccttcgcttccgcaaaatgaggcctcattctcttttcctactctgtctttaaatgtagttaagtcattagccgccttgtttatcgctcagcactctttcatgtctcattgctgggaggattactcccaaatctggttttccagttctgcctctcatgagtccctcgattcggcttcttcagtaaaacatttttaactggtttttctgctctcagggcaactcaagacagctagcaaaacaaaaagcaagctaattattccccttcatctcctcttctcctttcttcttattttttgagacagagtctcactctgtcacccaggccggagtgcagcggtgcgatctcagctcactgcaacctccaactcctgggttcacgcatttctgcctcagcctcccgagtagctgggattacaggtgcctgccaccacgcctggctaatttttgtatttttagtagagatgggtttcaccatgttggccaggctggtctcgaactcctgatctcaggcaattgaccccccccccccccctcagcctcccaaagtgttgggattacaggtgtgagccaccgtgcccggcctcctctcctttaaaatacttataattatgccatcattctgctcatctaagttctaaatcttggatgtcataattggttttcccagttcctaaaacatttgcgtagatataaaaatttgtctattttgtgtgtttgtgatgattttggatttactgttcaccctgctaccttactattgcattagtagtattagaacagtgtttctgtcccatttcacatactatgttgttgtcagagcagtcttcctaaaaccccactttgtaaatggaacttttctctctcttgcattccttttttaaagaccaggtctcactctaatgcccaggcacgatcatagctcactgcagccttgaacacctgggctcaagcagtcctcccacctcagcctcttgagtagttacaactacagatcattcttgctcagaataccttcatgatttcttgctaaaattccaaaatctttagcttggcatttgggattttctacagtaggaaccctgtccatcacataaaccttaacgtcactacatgtgcttatgcaaaaagggctgcctgaatgagttgcttgaatgtatgtactatttgaataattacctgtttgccattgcttgctgtttatattacctggaatgccatccttttcttcttgagagctttagcacaaatccctcctcagtaaaaatagtggcttaagtttcctgagtgcttacgtctgtgaggcaccatgcctttaatttccactattgcattgaagcagtggttatagttatcagtcaagccttgtacattaaaatatacacacccaaatatatatacacaccttgtgacacaggtactgttatcatcaacttgcatttggaggatttgtccaagatcacatacctagtaagtagcaagagtgggtctctgtctcatgtaattccagagcccaggtgcttagtcatactccagtgccatagcacttatagctaacacttactagaggaccagttacatgtcagggactgctataagggcttacatatttgatcctttgaacaccctaatgaggtagcaactgcagtgatctctgttgtatatatgatgaaattgacgctttgagaagtaacttacccacagtctcatatctgcgaaacgggaaagccagaattagaacccaggcggtctgcttttggaattctactgtaagtctctttgataagctgtcaaattgtacagccacagagggaaaaatttactgtttgtccatctatttgtcattatataagggattgggtataaagaaataagcattatataggcgttatataaggacttggatataaagaaatgaagcaagaaaaaaaaatctcatcttctctaaactcatagagcttgcgttgtagtaccactgtctatacctgatcctcaagggcacagatgtggtatttagttgttctgtattagtagtaccttgcgcgagtaagtatttaatgtgttggtgatgataattcattggcttttctgttaactcctgccaaggagactttgccctgatttaggcttattaataatttttttttcccagacaactcgtagccaggcgttcattctcttcccgctcatctttcctcttcccatttgaatcatgtttttgttgacatctagagtattttatcccattatgtactatggagcattcttctatttgtagggataggattaccaccctggagaattaatttttttcttttttcctcagtactatactggcaattgctggagaagattttgcaattgttgcttctgatactcgattgagtgaagggttttcaattcatacgcgggatagccccaaatgttacaaattgtaagtaaatatttctaaagacatttcacaatgcctttgtaatgatttaatgttgtgagagtttctacttctaaatgatttgtttcatgagtttttaagttgctgttgggagcatttttattagaaaaccattttctaagttaatgtttcctaataatttaatgtgcagtcttaataatatttgctgtattcagggtaccaaaagtgctttcggtaacctaaatgtgttcaccccagcattttaccatgaaaaatttcctgctgtgtcttaacatggtggaaggccagagaaagaaagaagagcaagcgaacccactgctgtgataatgtccattcatgaaagctgagccctaggacctaaacacctggtcccaactcccagtaccatcacaatggcaattaaatttcaacatgagttttgaagggaatattcaaaccacagcaccattaatccattaaatgatattttttttaaatctgcctccccacactttttttttttacctgaaacattcgttttagaaatatcctaagcaattatgtccacagctcagttttaataggctagctatgtttttcctaaaacatgaaaataaagccaaaacttaaaaaaacaaaaagcctgcataaatactgaatacatactgcagattggcagtggtctgtatttaccagttttggaaatgcttataaatggtcatgaattcctgggttaattaaacttgaattgtaataggaatgggacttacgaggtttaggtcctttggatggaccctccttgtattgtaggaagtaggtacagaagaaaagatacgttgtctttcctgctcctagggatggcccacatcttaaaaagcaatgaagtttgttttcgtcttcccagttctgtttctctccacttgcatcttttgataccccctttctgctttctgtttatggtgctcttgtgttacctttttttctcctcaaggacgacacttgtacaacttgaaagtagtaaatattagaaataagattttaaaacaactttatggataccatccttgtactagcttttactcatcttttaaatattgctttagttacgtttgctggtgaagtgagcactttttttttttttttttttttgtgaaacacgtcagatatagagatagagaataagaacaatgcagcattaacgaatgcctgtatatatccctcatcccacgtcctgtggggctgacctagaactaagcttgcctcttccaaacctgtttcagactgtattctttgcatgaaaactcccattcctttgatgcacctggatatttgggaaaagcatcttgaagttctaagatttctgtctttccctgttggtattgtcaaccaatcttgtcagtaaaggcagtaaagccttataggggattggacgtcttcaccttagtgcagtgaggttgatggtaggcatagatcaggtgatgttagtgatgaccctagaggtgtcagctgctctcctagtaggacaggtatggtttgtgcgagtcattcgtaagtttccaagaggaattgtgtggcctctgcaaaatattgtttaggtttctttatagattcatatcaagatctaggaattaatttttgaaatacacggttgaatttgtatgtctataccaaattttaatcctctccatacagatggacatttaggttttgttttgttttggggtgctatttaaatgagtactcactggtgagtctagagcatccctttgcatacttggataagtatattaacaagatggatttctagcaatagaattggtgagagtggtgtgtatttaaatttttaataaataccaccaaattgcccatctaacaggttaatcagtttatactgtttccacaacctcaccagcatttagttagttaggcatttttagccagtataattggttgaaatagtctctttttgagatttggatttctgagtaacatagaggctcttatgtttatggtgacttaatgtctcttttttctgtgacttgtctgttcatagaagttacccatctttcctttatgttattgctttccttatttgtaagaatttttatagaattaaaattagactttggggttagatgctactaatatattttcttagggttttaaaaagctattcttaaatttccctgtagaattttatgtagtcaaatttatgaaatttttctgtgtggcccttggattgtgttgtttaaatctaccttcacgaggctgggtgcagtggttcacacctgtaatcccagcactttggaggccaaggcaggtggattacctgaggtcaggagtttgagaccagcctggccaacatggtgaaaccccatctctactaaaaatacaaaaatcagctgggtgtggtggcgggtgcctgtaatcccagatacttgggaggctgaggcaggggaattgcttgaacccaggaggcggaagttgcagtgagccaagattgcgccactgcattccagcctgggtgacaagagcgaaactccgtctcaaaaatcagtcaattaacctacctacgtatcttcctcagcccaagatagtaaaaaaaattcacccatgatttatttagtccattcatagtcgcatttttaaagtctttgatccacctgtaattcatctggaataaggggtaagatggaatacagacccctcctccccagaagggtgactgtttgtcccattaccatttagggaatagtgggaatcagaattttaaatttaaaattgccgaagatatgttttgctctactatctaaccagctcagttttctgaaatgtgctttttacagaacagacaaaacagtcattggatgcagcggttttcatggagactgtcttacgctgacaaagattattgaagcaagactaaaggtagatgcttttgtacatttctacactattttaaattaatagtaattcattaaattcttttaagcctacagcatgactgttggtcagatagctagagagtcactaggttagtagatgaattacaaatgtatgctagaaatgaaatgatatcattaatgcagggtcattaaagtagcataatgtgaaacagcagcacattccatttgttaaagtcttgtatcatatgaagggttctctacccttttagaaggagcctgggaggagttcttcttctgaagatactcttccctcaaaaacaaagcaaatcaatttctgtggcaggagagagcccaggaaagatttgacacaggagcttggtttgcatcaccatcagttgacaagcttttcctctttacagtgctgtgctcttagttggcaggatgcatgagtagaaatatgaaagaatgaataagctgggagcttggatgggaggcacaacatgcaccattaacgtctgtcacctgaccagcttcagttgatagccagctgccagaagtcaggggtgatcacattctgttttgcctattcatgaataacacttgagattatttacacttatgagtggttactggagtatatagtatatttatttaactgacacatgctttttgaatgtgtagaaaggatttcactcagtatttatcaattgttaatgcttttttagaaacttacattgaaagccatagtgacttacatttattggcatatttatatgataattcctaatgcttattttataaatgggagttagaagacaaaagtaaacatgatattgttaataaaacaaggaatggtgaattctacataatacacaccccttcctgaagtttttctctcatactttattaggtggtgaagtaaataaatgttggtgcttggtttcgaaatgaaatggaatgaaatttttttttttttttttgagacagagtttcactcttgttgcccagggtggagtgcaatggcatgatcttggctcactgcaacctctgcctcctgggttcaagtgattatcctgccacagcctcccgagtagctgagattacaggcacctgtcaccacccctgtctaatttttgtattttagtagagacggggtttcaccatgttggccaggctggtctcgaacccctgacttcaggtgatccacccatctcggcctcccaaagtgctgggattacaggccagcagtgagccactgtgcccggcctatgaataattttttatagtttttatcttggaaaggcattcctctataaaaaacttacctgttacttgtagttcatttctaatcatttttcagtgttttgactgtcattatttaattttacggtgctagttagatatctatctgtctatttatttagagacagcgtctcactttgttgcacaggctggagtacagtggcgccattgtagctcactgtagccttcatctcctgggctcaaacattctcccgcctcagttgagattacaggtgtgagccactatgcctggccattaagtttctcattagagatgtttgctatgtggttaacaaaaattggtgatcttgaattcattttatgtttataatttttgtgaagtttctctaccagtgggtagtgtagggctcgcaaaggtatagtaaagctaggatttgcagtcactgtattgtcatgctaagaccctgttttggatgcttgtgttctctactgtagatgttttaaggatcacgaccactgctgtgtattaaaatcatgcagagtaagggtgctgccctgtgtcttctgttctcacagagatctgctccacaaagagagggacttacatctaggtttgatcagggattgccgtaattttttctgtaaaggaccagatagtaaatatttacagctttatgggcctcatttgatctgcttctgtagtgaaaaagcagccacggacaatattcatagcaatagggagtaggctggatttggcccctgagccaaactacaggggtagtttgttgacccctggtctatatgcagagtgagggagagagatggatttaaacccatcttccttaggccacttcatgtgccctttcatacacattagctcttggattagcagtacctgagataagggtggtatggaaaatagagtctaaaccagagagctgagggcaaacttggcattccttcccttaaaattttatgttagtaatactgtgttggttgatcatgaaggaaataggcatgctttccccttccactgtggtatgcatttatttattcactttatactgttgattgttctagtctataatggcctctgcctctacatgcctgtgacttttatcaataattgcagatgtataagcattccaataataaggccatgactacgggggcaattgctgcaatgctgtctacaatcctgtattcaaggcgcttctttccatactatgtttacaacatcatcggtggacttgatgaagaaggtagaattccttctttctggaaaatggtgggggggaggagttattattccctagatgtgtgtatccatctagagttgaaaagaaccataaataccatctgacacaattctcatttcatttctgataatgaaagtgatgaagaaactgaagctaatgtatgacctccaaaggcacattgaagctctaatagtgaatgttgagcagccagttattttgctattttctcaggaacttgcatgagttagtagtaaataattaggcatttttatcttatagaaagaaatcggacctagaaagcttgacctaaatgtgattctgagtattgaaaatttttttattaacaaatacacttcaaaaaagttctttaacggttctagaagtcatttggggtaattaataataagcatctactccagtgttttcagaactttttgaaacacctctctgattttgtcagagtcagaccaggattccctgagaatattaagtcttgttacttaatattccatcccatttttgttccagagctgcattacgccacatgggcaccaatgttttccatccaaatgttccaatccatttgttctcatttgcaatccaaatgttctcatttggattggcttttggttgcatctaaaaatcaaatacaagtacagtgtcccaggacagatctttgtcacttagagtagtccattgacacagatggataagtagtccatctgtgtcatttagagtagtccattgagataagaagttacagaagtgtctagatgaggatatcattggagtaagcccatcttctgtgttccttctggctgaacctgtggctgaagttgccctaaaagtaggggcagaggaattcctgtaagggactgccccgaacctagttggggttccagaacactaaatctcagggtaatcagtcaaaagcatttagtgctgcagcagtcctctcagcagacagcaggaaaagatgtgtccaaggtgagggagttgatttgagtgttgaaggaatttggttcagggccagggatagtttctgtgtgtttagcaacaggggtaatttctcagtgtttcaagcaatagcctaaacaacattgtcagcgcctgggaatgttcaaggcaggccttggcttgggtcagagcctccaggggaatacatgcggctggccacatcacagaacatctcagttggacacagaaagaaagcaaggggactggggaccctaaatcctgtgagggaaaattctaagaggaaagggtcaagcttcatttcagcgccctgcctctcggttgttgactcctatcgctttctgttccatgagcgttttctttgcgtgcgctatctctgactcttaacatccgcccccatacacagccttggggaacattctgatcattttacctgccatggtttaggcgtagacaaattaggttgacacaatttctttttaaggctttcaaccttacttgaaaaccaagagaaaaagtaaagtgtagaaatagtaaaaatagaaatgaattacctttaacatgggtaattagagtctagctacaaattaatttgcctaacttagcaagctggatgcttctggtgtcttttttgacttacattatgcctggctttaatgtcagattaatagattcagattttagcaacattaaaaatagctgagctgccattgaatttcagcaggccagacagcatcctttgagtttttccgagagttagagagtctaatctgggaaagctgatacctactaagcagcagacctaagattcaggtttggcttttgtttcacttcagagccctgttctttgatttccatgtaacagtgttgctagttttggtgacaacctcaggtgtctctagaactgtctttctaagcttgtctgtctggttggcttttaagtgttctttaaactaatttttattttatagaggaatttgtgtgaataataaagcagtcctctatcttttttttccattgccctaagacagttttcagctcttttacctgtatttcctggtacttacctccattttccaaaactctgtatttgtactgcactcttttgagatatcttttggtgttttgttctggtagatgatggttcttagctcttttgtgtcctcttcctcattagcatcctcctttaacacattacacttttggtaacatagacctttaatgtttttattatgaccagatagatattgatctttgttgcgccaagtagcatgcattaatattttctttcttgtgtaactcgtttttatttttttcttaagttaactatctctaattggctcagatttctttaaactttttgtcagttccttgtacattctctgagtacaattcatctggttgtcagacctcacatactaggtggatcccttttccctttgctccaggatggaccactgccatcctgagattcccccacatcctgtgttctcctctttcttgatttatttccttattttagaggcttacctcctaaaagatttctgaaaaaaacaaaatgggacctttttgagactttgcttttaggatcttttctttaccctggtgttctgaaattgtatagtgatgttccttgcctagagtttcttatttgttttatcctctttctccaccttctttcctctcctcctcccctacccctctgcaccttctccacaaccacctggattatgacccggtactttatttttgactccccatgttatccatgtctgtcttttttgttctactttatgaagatttccttaattttagcttttcatcctttactgattgcttttatttctggtgtcattaatttccaagagcttgtacttattttttgtctttttaaaaaaaatcctgtttactttctttgcagttttctgtatttcatcagaatgctttttttttcatgttgtgtgttcatttttggcctctgtcttctatgttagaggcttccttcaaatctctgatttttttttttttttttttttttgctgtccattcacattgaagagtcttgtaccaaaatttgattatgaaagtccttgttgacatggcttgtcaactgacagccgttaactgggtgcttaagtaagcagcattttcttcagatgaagaatttctttaatcttttttcctgaggtgaggtgggactacaggaagagaagcccggttggcagctttttaggcctcggaggaggaagggggctgaaggtctgtgttttgtttacatcaactttccatttcatgtgttttgctcctaccctttgccactctagagcctggtcccctaagtccagagcctctgctaatgtctcaggagacttcctttactgtcttctgtgttggtggatgcagggacctggagagcagtgctccatattgaaaccttcaggacagcaaggtccacagctctttcccttggtgtcaaccgctgtctgcactaacctctctgtctttaatctcttagctgctctcatgccttttaaaaatttttctcccaaattaaaagtggctttagtttttctgtagtgaaaacaatcagtacatgtttatacatacactcatgtagttttatgtaagtaggactttggtatctgtttttctgtaactatacattatgtattatcaaggagatctaagctatatgcataatgatttttgtatttaattaacaaaaaatttttttgtcttctgtttttgctgctgtaatacatagcatcatttacctaaccagtcctctaaagggcattttggcttcctgttttcttaatgtaaacactatgatgaacatccttgtacatacatttttgtgtacttccccaattatgcttgtcttgctagaataaacttcgagtagttgaagtattgggtcagataaatttttttttgtattttgttgagtatactctttctgaaggatacgccagtaccctgagtacccgattttatataaccttcccagtattagaattaacacattttgaaacatctttttgcctattgaacagtttattattttcatttatatatattcttgggcatgttttcatatgtttattgactttataaatttcctctttggagactgattcatatattaactgttgcccatttccttatttgcaggttagttttcttcttattgattttcaagaactacattcgactgtgtcaaatgtctgtgatattatagatactcccaagagtgttatttgtctcttttgggtggtgccttttgctacacagaaattgctgtgtttcatacagtctaatctgtcaatcatttctttatgacattcagtttcttgccttgttagaaaaacttctcccatccaaagcttagctgtatttcttttaagacttgtctgattttattttttacattgaaatgattgtgctttttggattttactttgatgaggaaaagcactttgtaatcaagattcatgccattctacatttatttttgtttttatttattgatttttgctgttttatactgattttactagtgtctctcttgcttcttctagggggtctttaaagctgtgttcttggacatagcccaccctttctttggtttatttttttaaatttgttgtgtgtggttttctgagattggttccatccttgggtaaagcttttgggcctcagtttacttgtggcctgtcatcctcatgagagatacaatcatttttctgcctttacaccttacatctctttctttttttgtatattgaggttagtggattgcctgctgtgatctcatgtcttgtcccaagcttgcttccagcaaaaatacttcccagtttcttaggtgacctcagatggtgccttctccaccagagaattcagtttacacaatcctttttctttttttgagaccaagtctcgctctgttgcccaggctggagtgcagtggcatgatctcggctcaccacaacctccgcctcctgggttcaagcgattctcctgcctcagcctcccaagtagttgggaatagaggcacgtgccaccatgctcagctaatttttgtatttttagtagagatggggtttcactgtgttggccaggctgatctcgaactcctgacctcgtgatcggcccacctcagcctcccagagtgctgggattacaggcgtgagccaccgcgcctggccaagtttacgcagttctatagtagaaaacatacaaagctaacagtggcagttgtacatggttagtaaggagattgtccctatatcacatctcccagggtactgagttctggtatataatgtgttttctaaatcagttatgtttttaaaaaatcataccttgtaaatgactcgtgatttctcatacccagaacacggttgtttttaacaggcctttttaacgattgtagaatcacctgtgttctttgtaacaaactcaaataagatagaagcacatgaattaattcccttcttttcttgcctctaattcagagctcaaagatgaccagccacagttacttatctttccagacttttttgtgcttgtacaaatagttttcttattcttttaaacaaaagcagtatcgtattttacaggttacagaattctcttcgttttactgtgtcttgcggatgtgtcccttggacctgtctatatacataagtcgtgctttccttcaagttctcctcttcgttagcttaggagagccaagaaataaagactttcttacaaatgactgtttgagtttggctgatgtgtcctacagaaacctcaccatctctctctgtgttctccctactctcttacgggtccttacctactaccatggcttggattatttttgtgtattctcatggcttccaactgttttacatctgcagtggttaattctcttgtcatctttacctgaagatcataaaaatgcctttctccctcttacccaccctttctgtgttactcaatattgtattttaactcccaagcctacagtttacccttgaacaacacaccaacacggggattggggctgtctgctgggtggcacctgtgcaatggtgactgggttctggctgtcacatgtgcaacagtgtgtgtgctgcagctgtcaccagtgcaacagtggctgtgttccaactgttccctgaagttttagccaaggtgatagtccgttttgtgtcacgttttgacctgatttatttttgcgatgatttgggattgtgattggataccatccttatgaatactgttttcttctttaaggaaagggggctgtatacagctttgatccagtagggtcttaccagagagactccttcaaggctggaggctcagcaagtgccatgctacagcccctgcttgacaaccaggtaatgatactgtgtccaggtaatgatactatgtccaacttgtcatggtgttcagttgaagtgccttcctccaagttctcctcttcattagcttaggagagccaagatataaagactttcttataaattactgtttgagtttggcagacgtgtcctacagaaacctcatggtctctctctgtgttctgcctactctcttgtgggtccttacctactcccatggttttgattgttttcctgtattctcatggcttccaactcttttatgtctgtagtggctaattctcttgctgtctttacctgaagatcataaaaatgcctttttccctcttaccccccctttctgtgttacccaatactgtacttgaactcccaagcatacagttgagccttgaacaacacggggattggggcgccagttccccgagcactggaaaatccacatataactttcgactccaagaaaacttacaaataagcctactgttgactggaagccttgccaataatgtaaactgtggattatcacgtattttacatatgtattatgtgctgtattcttatgataaataaactacaggaaagagaatgttattaagaaaattataggaagagaaaatacatttacaatactgtatttgttgatactgtaagtttacatcatctgtttacaaggagaatcatctgtctggagtggtggacaaccacagctgcagacctcaatctacagtacatatcaagcaattcagctttttcttgtgatgtcataactttccctgcttcttggggagcagttccagcatcactaatagtgctttgtttgggccacttgttatttaaggtttataataatcgcactaaacacaatgaaaaacaaaggagaacattgagagatcactttaactttttataatcagtttatgtgtattttatggtagtaaatgataaaatagctagtatctacatacagtttatacatttgtggcatacctttctcttaatttttaaggtatttttaggctacttggctcatctgagtttttcaaagtgttgcgagtctccaaaaacttctcagtgtgtttactgaaaatttatgtgtcagtgggcctgagtggttgaaaacggtgttattcaaaggccgcctgtatttctaattcgtccctctttgtgattactgctggctaaattcagacctacattattagattattggatttatttcctaacatcctttctgcctacaagtttacttccctaattcctcctgctcagttttctgaaggatgtcatatatagctactcctctgcttattgcttattgacctcatctcctgtcaccccactacacccagaccctaactctgcttttctcagaaaagatgtgcttttcctaactccgtcccacatcttcagtctggaatgttctgtgctcttcagtgtagccttcagcgctcacctacttaaaagtcctttctgctgaagcctgtcttcttctaggagacttagtggacatctgttggggctctcctggctcttattttcttcttagttatagcaattctctgatcactttgcttgcatacgtccacctctccgggtcatgtgcttctcaagagtgggagctttgccagggaatcgttgtcagatttctgatgtgtgtaattcatccaggtctggaagggtctttattcagtctgaaggacattttaattttgtgtagtattttcatcacaaatcctcgtacacatgagggtattggaagaaacttgaacctttcctttgtgctcactgtcacatgacatctcacccaagtttcatgtcccaccaggttggttttaagaacatgcagaatgtggagcatgttccgctgtccttggacagagccatgcggctggtgaaagatgtcttcatttctgcggctgagagagatgtgtacactggggacgcactccggatctgcatagtgaccaaagagggcatcagggaggaaactgtttccttaaggaaggactgatctgtgtgctcttatcaccaatcagttcagacctggttgattttgtactttggaactgtaccttggatggttttgtttattaaaagagaaacctgaagtactcattttgctataacttgtcttctctaagcaggacagatataggaagtagaatttcttttaattttcttcatttttcccacccttttctatttttctgagatttttttttttttttttttttttttttgcattttaagtaatgaaaacaggtcatgttaattttcccttacactaatgaggtaggaatttctctgtaaaagttgaccttttgagcaaacttatcttatgaagagggctctggtgtttacgcagccagcttgcctgaagggacctttaaaccatccagaagggagagtatttactagggttttattaagactctaatggttataaatgaaatatcttaagatttttcacttctgggactgttaagccatctggaatagctattttggagaaaaatcttcaaccaaaataaaactgtaaaaaaaaaaaataggcctttatacaagctgtagccagaaatctgggataatttttacaagcactttagtaatgttataattgagacctaagttttgatagagccaaaattttttagatctattaaatacattttaactccattataatatttgagtaattttcttgttattgaacaagtcaaattatatgtaacatgggagttattgtatgctttgtaccagaacaacctgtggtataaatggaattttactaagttagtggttaatcttagataccacttttgtttattttgccttttataaataattcaaattatcgaaagctgctagtagatacacattgtaaacatttattgcacaaacatcaatactgtcactcactatcccaggcattggggacacagtggtaacacctggttcatctcttaacagtgtctgtatgaggattctccaaagactcagaaccaataggatatgtttgtatatagagagagatgagaaagggtttattaaagaaattggctcactcagttattgagactgagaattcccatgcctggctgtctgcaagctggggagccagagaaactggcagcatggctcagtccaagtctgaaggcctcacaaccagggaagctgatggtataacccttgaagtcctgaaaataaggagttgggtgtgaggggttgctaatcaagtccctggctcgaggagaaagacagtgaattatttgcctttgccttttggttctatctgggctccattcagttggatggtgcctgctcacacaggctgatctgcactcagtccacaaactcctaggccagtctccggaaacatcctcacagacaaacccagaagtaatgctttacctgctgtcttgatatcctttaatccagtcaagttgacacctaaaattaactatcccaatgtcccaactaaaaactgtagagtatcccaatttcaaatctacattttttcttctttatatacactaggtatattcttattctaaaggatttcccattttggaattttctgtttatataaagttgtgtatctaggattttctataaggttctcacctcccaaggtgtatagggaagttctacaaattgagtaatgattgatggcacataattagtgttccatgatgtttttttacaaccttcagctaacattgttttaatccagtattgctgtagactttgaacatggtcttagttttggagtgaacacgacttagtccagaatgtgtttggcatatggctcctagagctaacctggctactagttatttgggtagttttatagatcattcaggcacattccttgtgtgaaaagaaaacctttgataaacattagaagtatgattcattcttaagagttaggcttgaagattccagtgagaagctgctgatgtagagactttctcttcattactgcctgcaaggggattggaagtatctggtaatattacaagtgattgatggaaaactgcttgagaggttggccatgactccatttatacacacagaatgcacgtagatgtttggatttgtcttaattatccgacagatggcataaatactttccggcagtctgctcagtggggctgtgctgacttgggaggttagaaacaaactgagcccgtgactgccaggtaccactcgtgtctccatatttcccatgcagcaatagctcctgctgtagtcacagtgactttgcaagcctacccaaggggaatgtagacaatttagtaggaaaataatatttcttaccaaaatgtcttggccaagcacagtggcttacgcctgtaatcctaatactttaggaggctgaggtggggaaatcacatgagcccaggaatttgagaccagcctgtgcagcatggccaaaccccctctctacaaaaaatgagccagggatggtggcacatgcctgtagtcgtagttactcaagaggctgaactggaagaatcacttgagcccaggaggtcaaggctgcagtgagctgtggttgtgccactgcactccagcctgggtgatagagcaagaccctgtctcaaaaaaaaaaaaaaaaaaaggcataattattaccctgataggtttcctttttctgcctttctgtacctgttacctgggtgagcacttaatggcccaaaagtgtattaacatgctttctgattctaggtctctcattccttgtatttgtgaatttcaaactgtaactggaagattccctgtatcagaattacgtagagcacttgttcaaaatgaactcctaggttcaatagacctattgtcccagtctctgagctagaaatcccaggtgattcttatgcatacacaatttgagaacttctttaactcctcatcagacaggttcaatcagagaagccctaggagacataaaaagatttattacagagttcggcctcacataagaagagctgattagatgatctatataagcctgtttctgtttggtgctaggagcctaaaacccatagcacaggctgtcaaaggggcgatggtgcaaaaggaggagggtcaacagactggattgtgacctgggaccatgggggacacctgtggcagtcccactaccttagaactttcacttagtgatcaggtactggcctcctttttcatggctagacatgcacctggcccaagagcttgggagaagttgcagaagggcctgacaggagcttaaggagctgggaccccatatgcagcccatgccgccaggtgagtcagcaggtaaagaacacgcgtgagcggtgacagcccatcatgctctgctcagcagcacaagagcagatggctgctgcctcactgcaccttctgcatcttaggctcctttctctgagtgcaaacccaccagagctgttcagtacccatcggtggtcttcattactgcacgaagtccaagtctttctccgctttgtgaaattaattcaaacttaaagctgttggaacttcaaattattctgagccttgaaagacatgtggctatgcagagcctgagttatgcggcatgcaggcgcaacttctgccttttcccctgtaaacaagacaaaaaggcaccagacataagacccctcaaatcactactcctccgcacagagtaataaagtaatcttggaatgagcagcaatctataaccaatcaaattgctgtggcgaatgcactggtcttgtatggaaaatgtgatcctgctaaaatttctaagtgaaaccttaacttctccactttgaaacattaaccttactggtttagagtcagtgtttccaggtggccattctcaagctctgcactcgaattaaccctctacttaatcatattttctaaatctcattatttaaggttgatagttttcagatccctccacgccatcctcgcctcccccacccaactccctacctcttcaacatacttctttaactagctgggctgctttgttaagtgggtgtgatattctcattcttcagtgattcagctaacattgtctgactttgtgtactgtccccttgaactttataaatcatactcttaaagtccagatcaagttttattttctctattgagattttcccaacttttctagattttatgaatttcttctgagcgtctattaacttgatacttgtagtttatattaaatatgaatgcaattgtttgctgttatttcttaaatattgcccctcccatttacttttcttatatatccattatacgaagtctgaacacataggaggcacctaaaacctataaagagacatggaacttgtttaaaggacccaggagtgatccgtttgttagtgttgattgaaaatccatcctgctgcctacttctggttgtgagagaaacattaaatctgtgagcagtgcaaacttctttccatccctcctctggagttcctagcagcaggcctgggtctaaacgtgggaaggagcttcaaatcttttatttcaagttgtcacttctatggaggggtagtagctctgtccatgggcaatttggaatgttggaggagcctgaaggcaagtggagttaggaatacaagtgtctcacccttgagttccgctcagcagaatgaagagtatgggtgcactgcttcacccacaggattgcgctgatttatctgttgacatactgtgctagttttctccctagaccgggaggaccgatagtgtatgtgggtgcatttcaaggcagccactttgtatggccactatgtccaatgaaaggagaggcctgtggccccactcttgtcatgagcaccctcccagccaggctcggtgtcttgtgcctcctccgccagacagagcttcatgtgcatctgctccactcttgaatgagtttagctgccaatttgctctcccttgtctgaatggctcctggagcttgtgaatcatctttgaaaaatatttctataatgggaaaatattttaaaaacagcatggggcgtgagcagatgtccacagggctgattgttagaaagtataggtgatcgaaagtgtgatcctcccactttgtcctcaagctgaccaatggcctgacctcttctgcagtgagaagctgctggagagttggctgagggtcaggaaatcaagggaccttcattcttcaatgaaagccaggctccacatcaccctccaagaggccgccagatggcagtgttgactcatccagcctctgtgagaaccacagttttctaatgctcagaaaactgctaccacagttttccagtgcacagactttactgagtgactaggaaggggccttgagcctaatcattaatcctgttttataacctggaaggaggtacaccttgttgctgtcctaaatctcagctattcctcagatcaaagcggaaaggacagaaggagataaacccagcaaaattggtagtaacctatgctggaggtgtgcaaaattggtagtaacctatgctggaggtgtcctaggtgtatgcaggggttgggaggtgggtgggtgggggagagggaaagggggagagagagagagagagagagagacagggagagagagagaaagaagaagaaggaggaggaggaggagagaagggagcaggggactggttgtggtttggagagacaaaaatcagaacacagaatttttttggagctatatactttcataaacaaggaaactaatggacagagaatacattaaagtgctctgtgcaggctgctgactagtggcagaacagattaagactcagtgtttagtttttctacttctctctctctctctgggtttcagtgtttagtttttctgcttctctctctctctctctttctgggttttctttgttttgtgctatcaagttcttcttatttcttttacttcaataaatttctttcaaatgaatctaaatgttatgatctaaggacacaagttgataaatgcaattaagattcttggttgaagattttgtgtaggtggtattagtagaaagtatccacaaagtcatggagcaaaatctcagatttacaaagttctaggtctgccttggccttccaaagtgttggaattacaggcatgagcccctgtgtctagccttatattgacatttttcacttgcattttagaattgattgttgagaaccccttgagtgacctaggtcaagagactgctgatctgtctgtgatgggtttgatatttttttctcctcaccaaaaatgctaagaacattcatttacaaaactggagacattggtaagctcttacctttctcatcctgtgggactgcaccagcctgtcttactgcttcctgggaggttctatgcacaaattctctgggaccttctcaggttaggcaagacctccagaagacctaccagctatcttgctcctgaagttcaaggctctgaaagccttaaatgtcatgaagcatgaagcatttccaggaaatttgtggttttctcttgaaacttcccaaagagaactttttctgaaaactgtttacagcaatttgatggagaccagcatttccgagggcccagaggaaggatcagagaacaaggacagtgacagggggatttggtcatgagagtcagaggcccgtgtgatttgcaatactcctttctggaagctctaacgaatatgaataatcaaagatgccattactgcataacaagagcattggacactaaaatataacttttccgagaaattgaaatttgcttatttatgttgtttatttaggggtatggtcagggtattttattcagacacttagtgtgctcaatttattcattttttcaacagtatttctggagctcctattatgttctaggcactataaagacacatgcacacgtatgtttattgcggtactattcacaatagcaaagacttggaaccaacccaaatgtccatcagtgatagactggattaagaaaatgtggcacatatacaccatggaatactatgcagccataaaaaatgatgagttcatgtccttcgtagggacatggatgaagctggaaaccatcattctcagtaaactatcgcaaggacaggaaaccaaacaatgcatgttctcactcataggtgggaattgaacaatgagaattgttcaattgttcaattggcaatgcagggcctgggaaggagcttcctgcaggccgaacagaaacaaaatgacacttccctccattctaagccaaataacctagtggttcctgtatgtgcctcagagtgaaattgaaatcctaaccctgaagtcattttgtagaggccttaagcttcttgttgtgagatgtttcctggttcccttcagaaaagggctctgacagggtttagcagaactattgatggacgacttggcatgagtacatctggatacatcagaactttgtcacaagagtggtgttttagttttaaattccttaaataaccaataattgggacatggttaagtaatttatgaaatgttcactacatgaaatattttctggccattaaaagtggtggccatgaagacctggcagcaacatgtcagaatattaacgcagaatgctaaatgaaaatcaagagtccagaattgtacacaatgactgcaggtgtgtgaaaacatgaaaatgcagacgaagaacatccaaattaatgtagtggactggccccctataaatgaaccagtggactggttcattttattgaccattttaggacaagactttatacatttggaattctatatttaatagctccccttgaatttttgcatgattttaaaagaccaaccaaacttcttataatacttaagtttgattgtggctgcaatctagcaatcaatttaatgaaaaatatctaactggaaactttgagttgataaaaaatctgtttgatagattatttcacttttaaatagcctgttgctatcaatagatacatctgatcatctcctaattagtaaataatgaagactgttgttttcataagtattaataagccacagatattctgggatgggttgctggcaggaggaagatgttgacttgctaactgaggagtatgaacccggtcagtgctgcttctgtacataaagactgttagtttagatgatggcctcaccaaaataatattctgatttgtctgcttgattatgaaggtgcacaattagcaagaaaaatctgagactttttagacagacgtatacaaaacctctgggttgtcttgagaaaacccagaaaaccgacttctctcaggcttcatgaaggggaaaaggtgttttaacctttagcacatgttacaaaaatctaatacggcaaaagatattgagaagtggagagtttcactaaaaattattgggctaataaatgcttagagccaatatgtacacacaacacacacacacacacacacacacacacacacacacaaaggaaaaagctaatggaaaacaactaagccctattttattccgttggaagccgtgagcaatgccaagtgtccacacttaaaaatgagatacaaacacgttttctctcatgtttttcacaaatttgaaggaaacaattatcagtcaagacttgtcagaagatttggtataaatttaagggcatatttactttctcttgtcactttaacaagtttatgttgtcccgtgtcccttataaatctgctagaaaaataagtttggaatttcaaagtagaaaaaccttggaaataagatcttcagtggcttgaagtttacacccagtctggagctagggcctccacatgcatcagcacatctcattcttgtgtgaaaatttttaaattgatatgtagtatttgtacatatttacagggtacatgtgatattttgttattgcataatgatcaagtcagggtatttggggtgttcagcaccttgagttcatcacctttctatgtgttgggaacattccaagtcctgtcttctagctattttgaaatatgcaaatattgttgttaactgtagtcaccctactctactgtcgaacaacagatctcactccttccatctaactgtctgtttgtacccattaatcaacctctctttctcctctcccccacacataccaccttcccaccctctgctagcgaccgttctaccttctactcagcacatctcattctgactcttccatctgatgtgagcaagtctgtcctgaattagagctgttttctagagggcaagatcttatctttgtttattatttaaagtgtccagcacgctttgatttattactaagcacgagctattttttacttgaatttctataatgctttgttattcattcgtgttttttattatggaaatgtcaaataagccccttgtatatttcacccaccactattcatggtaatcttattatcgttgtttattttgaagtaaatcctataattttattagtaaatattttagtgctcctaaaagataatgatcgcatttaaaaatataatcacagtatcacaattgtacctttaaaaattaactataatccctcaacattcaatatgcagtccatgttcaaatttccttgattgtctcataaatgtctattaacatgtcattcaaatctggaaacaagcctttttatctctctctctctctctttccttgaaatttacatgttgaagaatccaagtcgtttgtcatgcagaatcttccacattctagatataaatgattgcattcctgtaggttctgtcctgtcttttcctataaattggcagttaaatttagaggcttgattagattatgttcaatttttcatcaataaagcaacttatgttcatataaatcttatcattgcttagatgaacaaattagacctgtttctttttcttttcttttctttttgagagaaggtctccctctgttgcccaggctggagtgcagtggtataatcatgtctcaccgtagtctctacgtccctgggctcagtggtcctctcaccttagcctccttagtagctggaactacaggtgtgtgccactatacctggctaatttttgtacttttggtagagacagagtttcaccatgttgcccaggctggcctgaaactcctgggctctagggatccacccccctcagcctctcaaagtgctgggtttataggcatgaaccacagcacctggcccagacctgtttgtattggttaaatgataatgtactagaggagaaatcttttttgtgatatgacatatctcaaagtatcattgatttttgagtttgtgtcaatatgagataaactttagtttctaaaaatagccacaaactttctttagatcacagaatcacagattccacttgggcaggacttgagcctctcactcatgtagggcccctttccaccttcctggaggtatggtcacctgtcctttgcgtgaccaagtcgggatgaggagttagttacacgcagacaggccactggtaagtctctcacagtattccagcttttccttcaaggcatttttcttctagggttgttgtctattttgttgttgttgttgcctgtttgtaacaggtttctattctatcgtgttaccctgctctgtgttaataatataaatacctaacaaattttctagactatctagccctttaactgagggtttttttttctttttcttctgattctttttacagctaagcccctatacttaacactctcttttctctgctcctgatggttaacaccttgatttacatactttattcaagggataatagtaatactgtattgctattagtctcagtcacctctgtgtcatctttcctactgctgtgttgagactattttggggagtgtgcctcagcgacagctgtgagccacatttaacccaccagctgaagtcttgcaaagtgcccttcatgttcccgcgtgtacagatggctctgcctgatactaatggcagcagcagggtaaatgtgactgaggcgtcttctggggaggctcaggtggtccaggttcccttttagaaacttcagagtcaagctattcgtagtggtgactcttgtacgctccagctgcctggcctgttccctacccatgggggctcagatccctgatggccttaaaaggagagggcttgagaaaaatgccaccctgagtcagggtgtgggctgcacaggccagcagcttgtctctgagagtgatgccaagggagtggtttgcaggagagagagagggttctccaagatatcagcctcaaaatagcctggccatcctgaacttcccttaatagcctgccacagatcaatcacccacaatctagggaaagcctttgtaagcctatttggacattatgcttgtgctgccttgaagagcaattgaattccacctattattctgaggcataagatatttttccgtcctattttcctaaaactaaagctatctctaagttttgagagtatcctcttgcctctgtggcctgggaatggtggaatgtgatgagagtgacagggtggcagctgcacccaggatgctgactcggtgtcactgtcggcttcagttgatgtggccaccacacgttaaccacgtgacatcagtttctgggcagaagttaagtgtcttgccttctgcagtagattttatctctaagaattgtccagaaaaggaaaagcctgtttatctcaatttcctctgtgattatattccaaaataagcttccataggaaaaacattctatgcaagtgtggcagatggcctgggctaggccacagcgattctcccttcctttagagaagtacagccgtgtcaagtgtgtgtccccgaggattgcattaaggaagactttaagaagagttatagattggaagggaatttatgtgatttttccctccagaatgcatctgagcagggctcactcagcaggtggatgacttggggcctcagagaaaccctgggttttccaaggagccctgaatgtttataagacatcaggttagaacaggagtccaggggcgatatgttagaaaacctaacaagaactggacatttacaagaagtcaggtgtaaggactgaggagacgtggtttctttacttttgcagaacagctgtgcagccagtccctgggatgggctcctgtccggggctgcgcactcacaggctgccagagtgagcaatggaaaggcaggttaggcttctccccatgctactcaggccgctgtgctccaccacagcctacgggaggcagccaagctcctctgctacgtgtactgtcagaggctggtcacctcccctcacttttaagggtctctgaccctcacttttctggcaacagcaagttgcttatcgttgcccaaagatactgaagtggttgtaggctctggaatccaaaagacagagaatcaggcctaccccatctcttcctgtctgtgtggcctcaggcagttagtggaagtccgtaggccttgctccctcacttatgaaatgtggatgatagtaccttcctcataggcacccagtgaagagtacatgagataatgtttgtaaagctcttgttccagtgcctaacacagtacgtcctcagtgaatcacagttattcctgttatgccttacaggctattttcccagcggggacccacaacccctccatgcacccctagctcccatatgcctggaaactcacattcatctttcaaacgtgagtcaagttttgactcaagtgtgcctctctgtgaagctgcctctgatcccgtcccccgccttctttttctctgtccatttccatttcttatgactgcatagtattccatagtgtatatgtaccacattttctttatctaatccactgttgataggcacctaggttgattccatgtctttgctattgtcagtagtgctgtgatgaatgtgtgtgtgcatgtctttttttctttttgagacagagtttcgctcttgttgcccaggctggagtgcaatgatgtgcaaactctgcctcctgggttcaagcaattcttctgcctcagcctcctgagtagctgggattacaagcatgcgctaccacacctggctaattttgtatttttagtagagacaaggtttctccatgttggtcaggctggtctcaaactcccaacctcaggtcatcctccaacttcggcctcccaacgtgctgggattacaggcgtgggccactgtgcccagtgcatgtgtctttttggtagaatgaattgttttcatttggatatatacccagtagtgggattgctgggccaaattgtagtgctgttttaactttttcaagaactcttcaaactgctttctatagtggctgaactaattaaccttcccaccaacagtgtataattattcctttttctccacagcatcacagcatctgttgttttttgactgtttagtaatagccattttgactggtgtgagatggtatctcattgtggttttgatttgcatttctctgatgattagtgatatggagcatttttttgcgtttgttggctgcatgtctgtcttcttttgaggagcgtcttttcatgtcttttgcccattttttaatggggttgttttttgcttgttcatttgtttaagttccttgtaggttctggatattagacctttgtcagatgtgtgttttttgaatattttctcccattccgtaggttgtctgtttactctgttgatagtttcttttgctgtgcagaagccctttaattatgtcccacttgtcaatttttgtttttgttgaaattgcttttgaggactgaattacaagttctttcctaaggctaatgtctagaatggtttttcctaggttttcttctaggattcttaacagtttgaggtcttacatttaaatctttaatccacatgaactaatttttgtatacggtgaaaggtaggaatccagtttcattcttctgtgtatgactagacagcgaacccagcaccatttattgtttagagagccctttccccattgcttatttttgttgactttgttgaagatcagatggctgtaggtgtgtggctttatttctgggttctgtattctgttccattagtctatgtgtctgtttttgtaccagtgccaagttattttggctactgtagtattatagtatagtttgaagtcggataatgtgatgcctctggctgtgttcttcttgcttaatattgctttggctatttggatttttttttgttccatatgaatcttacagtagttttttctagttatttgaaaaatgacattggtagtttgataggaatagcattgaatctgtagattactttgggcagtatggccagattaatgatactgattcttccagtccatgggtagggaatgtttttccatttgtttgtatcatctatgattcctttcagcagtgttttgtagttcttcttgtagagatctttcacctcctagttagatgtattcctaggtattttattttctttgtggctgttgtaaatgagatcatgttcttgatttggttctcagcttgaatgttattggtgtataaaaatgctactgatttttatacattgactttgtattctacaaccttactgaaattgtttatcaattctaggagccttttggtggagtatttagggttttctaggtatagaaacatatcatctgctaagagagataatttgacttctttttttcctatttgtatgtcttttatttttttctcttgcctgacagctttggctaccacttccagtactatgctgaataggagtggtgagagtgagcatccttatcttgttccagttctcaaggggaatggttctagttttttggctattcagtgtgttgttagctgtgggtttatcatagacagctcttgttattttgaagggtgttcctttgatacctagtttcttgcgggtttttatcatgaagggatgttggattttattgaaagctttttctgtgtctgtggagatgatcatatggtttttgtttctaattctgtttatgtggtgaatcagatttattgatttgtgtgtgttgaaccaatcttgcctcccaggaataaagcctaattaatcatgatgagttaacttttcgatgtgctgttggattcagtttgctagtattttgttgagaatttttgcacgtatgttcatcggggatattggcctgcagttttattttttttgttgttgttgtgtctttattaggttttggtatcagagtgatactaactttgtagaatgagttagggagaagtccctcctcctagatttttgggaacactttcagtagaattggtactagctctcctttgcacatctggtagaattcagctgtgaatccatctggtctggggcttttttgtttgataggttttaaaattatggattcaattttggaacttaatattggtctgttcagggtttcaatttctccctgattcgatcttaagagattttgtgtttccaggaatttatctatttttttttctagattttctagcttgtgtgcatagaggtattcataatagtctctgaggatcttttgtatttctgtgggattggttgtgtaacgtcacctttgtcatttctgattgtgcctatttggatcttctctccttttttctttgttaacctagctagtggtctatcagtcttgtttatcctttcaaacaacaaacttttggtttagttgactctttgtatggatatttcggtctcaatttcatcctgttcttctctgattctagttatttcttttcttcttctagcattggggttagtttgttcttgtttttatagttcctctaggtgtcatgttaaattgttaatttgagatctttctaactttttgaggtagacgtttagcactgcaaatattcgtcttaacactgcttttgctacatcccagagattttagtatgttgtgtctctgcttttatttatttcaaagacttttctggtgtttgccttaatttcattgtttacccaagagtcattcaggatagagttgtttgatttctatgcaattgtgtggctttgagaggtcttcttagtattgacttctatttttattctactgtggtctgtgtgtatggttggtataattttgatttttttgaatttattgagacttgctttatggccaagaatatagttgatcttgcagtatgtttggtgtgcaagatgaaaagaatgtatattgtgggttgataggtgtattctgtagatgtctattaggtccaattggtcaggtgttgtatttaagtccagaatttcttggttagttttctgcctctatgatctgtctaatgctgatagtggggtgttgaagtcccccactattattgtgtggctgtctagaagtacttgttttatgaatcctgttgaattgaactctttatcattatgtaatggcccttctttgttcttttttactgtttggcttaaggtctactttatctgatataagaatagtgatccctaatcttttttgttttccatttgcatggtaggtttttctctaaccctgtactttgatcctatgggtgttgttacatgtgagatgggtctcttgaagatagcagatagatgggtcttgttttttaatccaactttccactctgtgtcttttgagtgggtgtttagaccatttacattcaacacgaatattaatatatgaggttttaatcatgttgtgaagttcttagctggttgctttgtagtttctattgtgtgggtgctctgtaggatctgtaggctgtgtacttcagtgtgcttttgtggtagccagtatcattctattgcttccatgtttagacctcctttaaggatctcttgtaagtctggtttagcggtaatgaattctcttagcacttgctggttgggaaaatattttatttcttttagctgagtttggtgggatatgaaattcttggttggactttcttttctttaagaatcctgaaaataggcccccaatctctcctggcttgtgaggtttctgccgaaaagtccactgttagcttgatagtgttcccattgtatgtgatttgacttttttctgtagctatctttaagattttttctttagagttgaccttggacagtctcatgactctctatgccttggtgatatttgttttgtatagtctctcacaggtgttctctggatttcttgtatctgcatgtctacttctccagcaagaatacggaaattttcttgaatgattccctcaaatatgttttccagattatttactttttatcctctctcaggaatgccaatagtttataagtttggtctatttgcataatctcttagttcttgaagatgttgttcatctttaaaaattctcttttctttattttcgtatgactgggttagttcaaaagactggtcttcaagctctgcaattctttcttctgcttggtccagtctattgataaaactttcaattgtatttttaaaatttcttaagtgagttttcaattccagaaggtctaattgatttccccctttggaagatgtttgtctctttcttcatttcgtggattgctttgaaagtttctttgtgttgattttcaaccttgtcttagatttcattcagcttccttgcaatccatgctttgaattctttatgtgtcatttttgagtttccattttggttatagatcattgctggaaagctagttcaattctttggtggaatcactatattcaaatttttcatggtgtcataattcttgtgctggttccttctcatctggagatgttgacacttctaatttttgtgaatattttcatccaggattcttatctttttctttcttttactatagtagtattattagttttctttccttttccctttaccccctccctaggggtgcaactgtagagaatgctgggtagggtcttttggctttatttctatagccctgtgcacttctttcagcttttatattgggctgtgcagttcgacctacaatccagtagatggcacttataggtaagagccagcagcagccaacgtggctgggtctatacttgatccttctttagtggccgaagcttaccgttgcctcaggcaatggggtgattctggattgcacagtggtctgagctccctgctcagccctagggggtggaatgggggccacagtgggcaggcctggactgggcaggtctgcctacaggtccaccaatggcaagcacaagcatccttttactttcaatctccctgtatcattgtatttgaagtgagtttcttataaacagtgtatatttgggtcatgctttaattcactctgccaatctcttccttttaactggtttatttagagcacttacatttaatgaaattgttgatacattaggtctgaagttgccatctttttttaaattttctgctatttccctctgttttgtttttctgttatccctaccttcctatatatttcttgaatatttttgttttacaattccactttgatttatgtattgcactgtttagtttatctcttggtatcgcttttctacttattacacaaaacacggtctatctgtgttagcattttaccagctcccgtgaaaagtaggaaaaaaggtgacctcctttatgtcacctcaccctcctcatttataatttaataatcataaatatttgatattaataatatgtttaatgtaattgtctgaaatatttcctccatgtgtatttacaaccacatcagttagggttataatttttgcttcaactatcaaacataatttagaatattcaagaggagaaggaaaatgtattttttaatctatatttttactattttccttgttctttcttttttcctaatgattgagaacatgtctcagagcgtctgaggaatgtgagatatgaattttttttttgagagagacagggccttactctgtcacccacactgtagtggagtacagtggcatgatcataacttattacagccttgaactcatgggctcaagtggtcctcctgccccagcctcctgcgtaaccaggactacagacatgcaccgtcatgtcaagtaatttttaaatcaatctttccttcttttctttttttctttctttcgtggagacaggatcttgatcttactgtgttgcccagggcggtcttgaactcccattctcaagtgaccctctcacctcagcctccgaaagtgctaggattataggcatgaaacaccatgcctggcctgatatggaaaatgtatcagacgcagagagacataaacatgagactctaatcatgtcctctgcagccatacctgggggcaagtttttaaaggcattttgattttttttccctttcttctagtttccaggctagctgataaattacctaaaatgttaccacaagttgcacaatgtaactctcatccataatcttcatgttcatggaatttgtgatacaaagaaaaatgtatagccaaccaatcacttttgttattttaataaagcaaagtaaattattggtaaacaacttaaggactgcacttcttttttgcttttacaaaccacttgtagttactgttaattggagcatggatcaaggcaacttgcatgagtctcctgggcttcagtcctcagcttcagcccagataaactctctacttatattaattttgcctcagtttttttcctttaggttaacatgatccaagattctttcttttattagttcttatctgtttagaaaacttcccttagccattattttagaggaggtcggctggcaacaaattctcttacactgttctttcatctgaaaatatcttcaagtccccttcattcacctttatattttctctgaataaataatcctgggttgacaattcttttgtttgagcacttgaaaaatgttgttacttccttctggctccctggtttctgatgagaaattccgtatcattcaaattgttttcccttataggtagatgttatttctctcattgctttcaatattttttctttgtctttagttttcaaaagtttagttatagcatgctttggcatggatttctttgggtttatcctatttggagttcactcaacattttgaatctgtagatttatgtcttttgccagatttagaaaatattcatccactatttgtttgactactttttaagtcatgccctctttctcctctctctgggactccaataacataaatgttagacctttgattgtgatcctgtaggtctccaaggctctgtttatttctttctgcagttcagattaggtaatttctttttttattttattttatttccctgttttaattccctgttcaccaattctttcctctgtcccctccattctgctgttgagtccatctactgagttttaaaaacctttgttgttattgcatgtctcagttctaaaatttccattcagttattcttaatatcctctaattatttgctggaactttctatttttctaatatatttcaagtgtttttgtattgcttgttgaagtttttttatttatttttattttattttatgtatttatttttttgagacagagtcttgcccagtcacccaggctggagtgcagtgtcgtgatctcagctcactgcaatctccacctcctgggttcaagtgattctcgtctcagcctcctgagtagcacgtgccactatgcctggctaatttttgtatttttagtagagatggggtttcaccatgttggccaggctggtcttgaactcctgacctcaagtgatctgcccgccttggcctcccaaagtactgggattacagctgtgagccaccatgcccagcctgaagtgtttttatgatggttggtctaaaatcgttgtcatataataattaatatatctgccagtgttagcagtccttgttgtttcactctctcatcaacatgtgacattgtcagagttttattaaagccattttgctaggtgtacagtaatattacattgtggtttcaatttgtatttccctaatgactaattatgttttaaatcatttttataatgggtcatttgttttcttattattataccttcattggtttttaaaaagcttcctagcacctaaaacactccttaccatggcaggtaaggccctgtatgatataacccctgcctatcttttcagcttcatctttcacttaagtactgtccatatagcttgatactctactgaaacaagttataatatcataatagacctccttcgtattctcactcccaaatctgtaattctacctgcaccttttgctctttattccatccagataaaactggagaaggtctcccctactaacaaaaatcaaacccttcacaggagattttgatcccattccctctcatggggtcattgtctagaacttctttcttttcctttctgttgtgtgctattgatctttcattagtatttaatcatcctcaccagtaactaatatgctttattacctcccattataaagaaataagagagcctcccttgttccctaattaccctctagctattgtaccctctagctaattcttttcatagtcaaacctctcataaatgttgtctataaatgctgatcccacttctttccatcctttcctgctttctgatctggcttttgtccccactacactaaaatgatcttgtcaaggtacaagtgatctccttgtggccaaatagcatgataattctcttgattgaaacagtctattctcttagctttggtgatgccacattctctgaagttttctcccgtttcattagctgctactcagttttctgtacactttctttttctctagccaacttctagttgtggccatttctcaaggctcagtctccttccactctctccctagcttttcaaccagccccatgatactaaatgtcatctatatgctgatcagtcctaaatttatatttctggactaaacctatcctttgaatcctagactaaaatattcaatgactataacatcactactgagattctccaatagaaacatgtcccaaagtgaatgttggtatccagcttttcctacaatctgttcatccaggagtcttcttcatgtgccctttcatcagttgctcacactatagacctgaatggctttcctttcattccttacatctagtccagtacagatcttgtcagttctacctaccatacatatctcagactcaaccacatcttgtcgtcttcagtaaccatcatctaacttatcatctgcacaggtctgggccattcggatagccactgcactaatttatctagctattcccccaccaatctcaccaaacagccagaatgaccttcttaaagcatatggaatcataccaatttctccattgtgttgtgttgctcatccacatgggttgtccatgtgcggcccctgtgtgtgtgtgttccctccacatggctcatccacatgtggtctctgtgtgtgcatcccctccaggtgaatcatccatgtgtggtttttgcgtgtgtgtgtgtgtccctcctgcaggtagttaatgcatgtgtggtctctgtgtgtgtttccccctcagtcgcctctcctccctcatttcatgcccctctcccactgaccaccgtcctccagctcccctgacctcattttttcccttgaacctatagagttattttctctcagtggctttggccagtttggtgtgtcaaccttgcatgctcattcatgcatggctcctcattctcacctgtcagtacttgttgcgcctccaaagagcaaccttcctagtcctccttttaagaagaaataggttccatactccattgttcactgtggcctagcctgtttgtctcctttataacattactccatttgcatttttattagtttttaatttccttgatctctctcggacaatagatgataaattccatgtgggaagaaactatgtgttccatatatcagtgtattcccagcatctacatagtatcaagtgtataataggcattcaataaatattcttaacaaactatttgtaactctaacactcaagttccttcactgtttcacacgtctaaacttttgtgttgtggcggtattttcttgcctaactgatcccaccttcttaaggactttttagaatgaaaggtattggaggtctcaatgatcattggcttcatagttcatacatggtcttctcttactgaggatgcgaagtacccacaacccccaccgcacctgcaggaaaatgagagtgatgctcactggccatcagaatgcaggtgatgaggccgcacatgatccagtgttcgggacaggtagagtggagactgccctgtctccatagccagactgccccagctcaaagaggttgcacatttcaagcattgtagtcgtagtataagaagagattcttagagctaagaaaactcgatttttgccagctgccatttgaattcaaattttagattagatttgaactcaaatttttctctttttgtaaagcttagtttcaagaggaaatgactgagctataatttttctcagtttcccatgatgttaatatatatctacaattttggtaatgaatgtatgaattcagacatattctgaaatccgagtctgggtggcaaaattttggcaataatttgagactgtcaaacttgtgaaagtatgttgctttggtaaaagtgttgaactagaaagttaaagattctatcattgatgtaaaccccacagtacaaatgacagacctcaagtgatatagcccacagtctagtagaataagttagtcaatcacatgtcggcgtgcatttgcattggttttattttagattgaggaacatgtgcatgtttgtcacatgggtatactgcatgctggcgggcacagggcttgtagtgtgcccattacccaaatagtgaacattgtaactgacagctaatttttcaacactcactcccctcccaacctcccaacttttggagctcccagtgtctattatttccatctctatgtccatgtgtacccattgttgttagctcccatttataatcaagaacaagcagtgtttgattttctctttctgagttagttcacttagcatagtggcctccagctgcatccatgttgttgcaaaggatgtgatttcattcttttttatggctgctgattaagatggatcaaaggcttacaccaatctgtaactgggcacttgtgtataaatagtcaattttccgttgactgctttgggaagagcaggagaagtgacagggaaggggcccccaggagagggtgccagacaagaatgcagagcagagaaagccacgcatgcagcagggcagagtgagcacacgcagctcacacggcgtgaacgcgcagcagagcagagggagcgcccgcagctcacacggcgtgaacgcgcagcggagcagagtgagcgcgtgcagctcccacggcgtgaacgcgcagtgagtggggaaggcttgcagaggcagctccttttgggccttggggagcatgtgacagatgatgaccttttatctcaagaccacaagacagtcagagaaaggagccacacagccagctgttatcctggttgctgtggggagtggtccaggatagtgctagtaagagtgataatggtacagaggctgctgtggtgtccagatgagagatggacagctaacaagctctccctattatgtcaataaggaccacgaggccacccttaaagaaactggaaaatgctttgctttgttattttaaatattttcatttatactctgcaatgtaaatatattaatattttcattaaaaataccccacagttatataaagagtgaaaattccactaaccactcacatacagccccactactctccccagaaccaaataggcccatagctggcttctccagccaccgtgccacaggctgctggcagcctggccccctctcccttctccacactgttggcaacggcttccctcagttctccagcacaggttacatctctctcagctagcctgagtattctttttcagagcaacctgattattttgttctagaaaaagcacaacctgtaattatttgttcacttgagtataatctgactcctccattataataaaccctctgaggcagcaacgtggtctcagtgtttctgccccagtgcttgaaacaaacatgatgtaagggagaagcgcagtaaagggctgacagcttctactgggcaagctttggggtgcaaatattcacattttttttctctccacacgcgaggtctttccctctctctctagttgaccctcattattcatggatttcttatttgtgaatctacctactcaccaacatttattggtaaccctcaaatcaaccctctcaagtgcacagagaagtgaaaagtttgtgtcttcagagcacatgcccccagctgcatgaggtgaaagtttgtcttcagagcacatgcttccagctgaatgaggcgaaagtttgtcttcagagcacatgctccaagatgaatgaggtgaaagtttgtcttcagagcacatgcttccagctgaatgagtgaaagtttgtcttcagagcacatgcttccagctgaatgaggcgaaagtttgtcttcagagcacatgctccaagatgaatgaggtgaaagtttgtcttcagagcacatgcttccagctgaatgagtgaaagtttgtcttcagagcacatgcttccagctgaatgagtgaaagtttgtcttcagtgcacatgctcccagctgaatgaggcgaaagtttgtcttcagtgcacatgctcccagatgaatgagtgaaagtttgtcttcagagcacatgcttccagctgaatgaggtgaaagtttgtcttcagtgcacatgcttccagctgaatgagtgaaagtttgtcttcagtgcacatgctccaagatgaatgaggtgaaagtttgtcttcagtgcacatgcttccagctgaatgagtaaaagtttgtcttcagagcacatgctcccagctgaatgagtgaaagtttgtcttcagtgcacatgctcccagctgaatgagtgaaagtttgtcttcagtgcacatgctcccagctgaatgaggcgaaagtttgtcttcagagcacatgctcccagatgaatgaggcgaaagtttgtcttcagagcacatgctcccagatgaatgaggcgaaagtttgtcttcagagcacatgcttccagctgaatgagtgaaagtttgtcttcagtgcacatgcttccagctgaatgagtgaaagtttgtcttcagagcacatgcttccagctgaatgagtgaaagtttgtcttcagagcacatgcttccagctgaatgagtgaaagtttgtcttcagtgcacatgctcccagatgaatgaggcgaaagtttgtcttcagtgcacatgcttccagctgaatgagtgaaagtttgtcttcagagcacatgctcccagctgaatgagtgaaagtttgtcttcagtgcacatgctcccagatgaatgaggcgaaagtttgtcttcagtgcacatgctcccagctgaatgagtgaaagtttgtcttcagtgcacatgctcccagctgaatgagtgaaagtttgtcttcagtgcacatgctcccagctgaatgaggggaaagtttgtcttcagagcacatgcttccagctgaatgagtgaaagtttgtcttcagagcacatgcttccagctgaatgagtgaaagtttgtcttcagagcacatgcttccagctgaatgagtgagtttgtcttcagagcacatgcttccagctgaatgagtgaaagtttgtcttcagagcacatgcttccagctgaatgagtgaaagtttgtcttcagagcacatgctcccagctgaatgagtgaaagtttgtcttcagtgcacatgctcccagatgaatgaggcgaaagtttgtcttcagtgcacatgcttccagctgaatgagtgaaagtttgtcttcagagcacatgctcccagctgaatgagtgaaagtttgtcttcagtgcacatgttcccagatgaatgaggcgaaagtttgtcttcagagcacatgctcccagctgaatgagtgaaagtttgtcttcagtgcacatgcttccagctgaatgagtgaaagtttgtcttcagtgcacatgctcccagctgaatgaggggaaagtttgtcttcagagcacatgcttccagctgaatgagtgaaagtttatctccagtgcacatgctccaagatgaatgaggtgaaagtttgtcttcagtgcacatgcttccagttgaatgagtgaaagtttgtcttcagagcacatgcttccagctgaatgagtgaaagtttgtcttcagtgcacatgctcccagctgaatgaggcgaaagtttgtcttcagtgcacatgctcccagctgaatgaggtgatgctcggccttctggttttaactcatactgtaagcaactgttttcttttcacagtttattttttattttttattttattttattttttgagacggagtctcgctctttggcccaggccagagtgcagtggcgcggtcttgcctcaccgcaagctccgcctcccggcatgaaccctcagcctcccttgtagctgggactacattcacagtttatttagtgccacttttttcgccgcatttttatgctttttgttggtgatttcactgtttaaaatagcctcaagcacagtgcggaagtgctgcttagcgttcctgagagcaagaaggctgtgaggtgcctttcggagaaaacacgcattagataagcttcattcagacatgagttacagtgccgttggtcatgttacttactctacaatatatactaagtaaggtgtctttaaacagaaacatacataaaacaaggttgtatattgatggggtgatgctgtgtcctgaggctcacgggaacctaacgcggtctttcctccatgagcgatggttcactgttcactaattcaatgttcgtgctgaaaaagaaaaatgacatcctaagcccctgagctgactgaatggactccttgttggccaagggggcgccagagaaattttaaaagctgagttcctggccatgatggaatggggagtttggacacgccttgttataccccctccctcgctaatcgccattagacttccttacgcgagggtcaatcagaagccacagccctttccaaagacttgccagactccccttccgtggttttgacacagtgacgaaccggcattccttcctgataagagaccaccgaccgtggactgcttctggccggtgtacagtggctgcacacgggatgcctctgcgccctccatttcatcttctacatacagacctaattttagtgcatttaaacgttaagtgctcaccccagattgaatgtggacggacatgcatgcatgtttgctctctatgcatgcatccatccatcatgaataacctgttagatacatgtacttagccaacccatttggcataaatccctgttccagcctttccgccctcaaagtgcctgcttttggtttctgcttcctagcctgcaagatggccagcctgcagggtgcaatcctttgtcagaaataaagctctcctctccaaatgtatgaacctcgtgattcttcagttgacagcagtgactttacaaaacacagctactataagtaatgagcatacttgtttattttgctcaaacttgccttccccttactaacagttgaggaggaggttggaaaataaatgtgtatgtgtatgtttgtgtatatatttgtatcttgtctgtcttctatgaattgcctgtggtttttttttttgcccatttttctgttgagttgtctttttcttgtcagtttgaataattcatttatatattattcatattaatttttaacctcttaaatactttgcaaatattttattcaagtagacaccttaaaagaaacttcatttatgtgggcttttctcatagggtggttttaagtgtgtatgtgatgaagtttgccagtattttcctttgttactcctgggtttgtttcttctatattttattagtataggttgaaggctttcttcaaactatactaataaaatataattctctgttttcactaggttttaaaaagtgagtcttttaattcatctgggatattttctggtgtgccatagcatagaaaactattgaatttaagcaactagtcagtctccttttcctattcttttcaattgatgtacaaataataataccttcagtattgttgtattgctaccgagtgaggagctcattcctcccttttttttcttccagtattgcctcctcctgctgctgtcagtctagagagtgggctcaagctaccatggtgggagttctgacccagagctgattctcatttgtgagaaatctccattccattccactctccagcagcaggtcccatgagcttacagttatactttatctatacttcaaacaaacctttaaaatctttatatataagtttagactaaagtctagacttcaaataagactttaatggggagagacccttttaaacctgaagagactgggaagagcagagtgctccgattctgtcaacatagatgcatgctgctctcttatgaattatgtccccgagtgctccttgttggccgcatgccagcgtcatcgtgaagacgtcaggcatcagccaactggggcagcagggcttggcacctgccctgaatccttaggtgtctgatcacgtcactgaagagagacaacctcagccggacgcctctggcaggatcctccatgcacagcaagacaaaccctccctgacctgtcagctggccatgggctctttgtgggtgaaattaggtttcctcacatcagtgtggggctaaactttgctttggggccttcactgggcaagaagttaatgtgcacagatgagctcctgctcccatcgccttgtccttttgtgtccctagctcaataaagctaaggatggttagaaaagaacttggaaactccagagatctgttccttcactgatcccagggccacaggggtgcacaaacctccagaaacaaaaggaagtgagcagaaaaaaacgtcataacacaacggccatcaacatgcaaaatgcaggagccttagggtcttccttccagatactcgatgtgttccaatttcagggtagtctccaaaagcctccccagtagaaggaaccttcatttctttcatcctccacaggccacatgtccagaactgtttactgtttttcagattctttaatacagttaattattttaaaggggaaaaattgcctaaagaatttgaccattagggacttaatccagggccatattttcctggtgatcagatgttcacagacacagtgcaatgatggtgagggagaagaggtttaagcataagagcagaaaggatcttgttccctcccttcagggggcctctgaatattctccagtgagttacgacgttggtgccatatctcaggaagtcacaccaactagacacttgtagaagccaatgtgttcccttgctgtggtgtatgtgggttagaaaataattttcaagtgtttgcttttccattaagcttcatgagatcagaagaaaatcttactccctgtccagagcacttgcaggtctctcgtgcctcctgctctgcttttcgctggtgctctggtaaatgatgcatgtgctcagagagcctgaccaagaagggcagccttgatttcccactcagcaggcaggaagccaccttctagatcagcagaggtcctccctggaaactccataggcctgtgggacaccagcttctgtggcttcctgtgggacaccagcttctgtggcttgcttggaagactggaggggagctggacaagcttgatgcctgctgtttggtgacctaggactcattccaactccccttcccaggtggctgcaggacttgcatttaatttccttctccagacagctgcaggatgtacccttcattcccttcccctgatggctgcaggatgtgacccacattcccttccccagaaggctgcaggacatgcccctcattcccttcccctgatgggtgtggaacataccactcattccctttccttaatgggggcagaatgtgcccatcattcccttttcctgatgggtgcaagacataccagtcagtcccttctcctgatggctgcaggatgggcccatcgttcccttttcctgatgggtgtggaacataccactcattccctttccttaatgggggcagaatgtgcccatcattcccttttcctgatgggtgcaagacataccggtcagtcccttctcctgatggctgcaggatgggcccatcgttcctttcccctagtggaggcaggacatgccactcattcccttgccttaatgagggcagaatgtgcccaccattcccttcccctgatgggtgcaggacatgcccatcagtcccttctcatgatagatgcaggacatgcccatcattcccttcccctgatgggtgcaggacatgcccatcattcccttcccctgatggctgcaggacatgcccatcattcccttcccctgatggctgcaggatgtgcccatcattcccttcccctgatggctgcaggatgtgcccatcattcccttcccctagtgggagcaggacatgccactgattctcttcccttaatgggtgcaggacatgccccctcatttctatgccccaatggctgcaggatgtacccctcattgctgcagggcatgcccttcattccctttcccagatggcttcaggatgtgaccttcattcccttccccgatggctgcaggatatactcctcattcccatcccaagttggttgcaggacatgcctcttattccttttcccagatggctgcaggacatatcctatccctttcccccagatggctgccagatgtgacccttattattttacccagatagctgcagtacattcccctcatttcctttctctcatggctgcagaacatgcccctcattcccttctcctgatggctgcagaacatgtctctcatttcctttccctgatggctacagaacatgcccttcctttccttcccctgatggctgtgggacatgcccctcatttccttcccctgatggctgcaggacatgttcctcatttccttcccctgatggctgcagaacatgcccctcactcccttcccctgatggctgcagaacatgtcccttatttcctttccttgatggctgcgggacatgcccctactttccttcccctgatggctgcaggacatgttcctcatttccttcccctgatggctgcagaacatgcccctcattcccttctcctgatggctgcacaacatgtccctcatttcctccccctgatggctgcagaacatgcccctcattcccttctcctgatggctgcacaacatgtccctcatttcctccccctgatggctgcaggacatgcccctcctttccttcccctgatggctgcaggacatgttcctcatttccttcccttgatggctgcagaacatgtccctcatttccttcccctgatggctgcagaacgtgtccctcattttcatcccctgatggctgcagaacatgtccctcctttccttcccctgatggctgcaggacatgcccctcctttccttcccctgatggctgcaggacatgttcctcatttccttcccctgatggctgcagaacatgtccctcattttcatcccctgatggtggcagaacatgtccctcttttccttccccagatggctgcagaacatgtccctcatttccttccccagatggctgtaggacatgcccctcattcccttcccctgatggctgcagaacatgtccctcattttcatcccctggcggtggcagaacatgtcgctcatttccttccccacatggctgcagaacatgtccctcatttccttcccctgatggctgtgggacatgcctcttttttccttcccctgctgtgagacatgcccctcattcccttcccctgatggctgcagaacatatccctcattttcatcccctgacagtggcagaacatgtccctcatttccttcccctggtggccgcaggacagttcccttatttccttcccctgacagctggaggacatgctcctcagtcccttctcctgatggctgcagaacatgtccctcatttcctttccctgatggctgtgggacatgcccctcatctccttcccctgacggctgcagaacacgtccctcatttccttcccctgatggttgcgtgatatgcctctcatttccctcccctgatgggtacaggacatgtccctcatttctttcccctgatggctgcagaacacatccctcatttcgttcccttgatggctgcagaacatgtccctcatttccttcccctgatggctgcagaacacgtccctcatttccttcccctgatggttgcgggatatgcctctcatttccctcccctgatgggtacaggacatgtccctcatttctttcccccgatggctgcagaacacatccctcatttcgttcccttgatggctgcagaacatggccctcatttccttcccctgatggctgcaggacatgtctcttatttccttcctcagatggctacaggacatgttcctcatttccttcccctgatggctgcaggacatgcctctcatttccttcccctgatggctgcagtgcatgcccctctttttcttcccctggtggctgcaggacatactcctcatttccctctcctgatagctgtgggacatgtccctcatttccttcccctgatgtctgtgggacatgcctctcattccctttggctctgggatgggacatgtccctcatttccttcccctgatggccgtgggacatgcccctcatttccttcccctggtggctgcaagacatactcctcatttccctctcctgatggctgcaggacatacttctcatttccctctcctgatggctgtgggacatgtccctcatttccttcccctgatggctgcaggacacgcctctcatttccttcccctgatggctgcaggacacgcctctcatttccttcccctgatggctgcagtgcatgcccctctttttcttccctgatggctgcaggacatgcctctcatttccttttcctgaaggctgcagtgcatgcccctctttttcttcccctaatggctacaggacatactccttatttccctctcctgatggccgtgggacatatccctcatttccctctcctgatggccatgggacatgcctctcattccctttggctctgggaaatgacggttcctcagagaggtcagtactactctgctttgccaatgcctgctttttggtcatgggcttgttctttttgggccggacattctctgttctgatctagtagatgggagcctggcatttagtagtgttcagtaaatgcttgtggagtgaatgcatgggtccagctctcctacctgtgcagaaaagcattggggctacatggccatgtgacatgggacaggtgatctcttgtctctgagcctcagctgctcacaccacatggtttttgagggagacttgttgatttggtcatggaagtgcctgagaagacaaagcgacaccaggaaccacaggcagaaagtgaggcatctggttccatcagtgagcagacagtggggagtcatccaagaccagaactagaaccactggggcagggagtttcagaaacagcaggggcaggggggtgtgactgaggagacaaatataataccaagaggccagaagaaaacactcctggttaagggtttcagacccctctctcatcgggaccctcatcccaccccagagagcccactctgggtggttaaggttttcagacccttctctcattgggaccctcatcccaccccaggtagcactgcagttccacaactgagagataagcttagtcagaaaacaaaacaggacagaaagggagggtccagtgggggtctcaagggcctacaggccaggaggcttcctggaaggccttaagtgtcatgcaggggtctttgggtcttgtagggaagggccaccttcctgaggggttgacggtcagggacagatttcagggaatgccagcagggagggatctggagtgggctgagggcctgtgttagccgggcccagcagggaaggtgctttggagaacaggcttttccactcacactatggtacgccctccgggggagggtaggggatggctccacgtgccataccttctctgtctgtctctcattagctctccggtggcactacagtgctcaaatcaggattgccaaagttcagaattagctgttctgaagaaacgtgagcccacagaagggccccaagcctcatggaaactctctctaaagcagtggtctgagctggggcacccaaaacagacatcttttgctttcaaaagcctctgcactccaaacaatacatgtgagtccttcctcgctccctctccacgccaaccctgagtgtgggctggatttagtggctttagaacagaatgttaaatagaaaaactagttacttacagtggagaaacctggcagacccacctcaaccaggagatgaaggctaacatcacccaagtcacattgctatcctgggaagggcagctcacattcttccccaaagcccacaacctcaatctaatcatgaggaaacaacagacaaacccaattcacgggatattcaaggaaagactgaggaactgtcacagaccagagtacctgagaaggcataacaactaaatgcagcacagggtcctggatgtgtcctggggcaaaagaacgggtgaaatctgaatatggtctggagcttagtagtggtgatgtgccaatgttaactgctagttttgatacatgtgctaatgttaattcttagttttgatacaaatgtcaacataaactcttagttttcatacacgtgccaatgttcattcttggttttgatacatatgccaatgttcattcttagttttgacacgtgtctatgctaatttttatttattttaattgtatttatttgtttattaattaccatctatggactcacagaaccaatgttatttcttagttttggtacatgtaccaaggttacacagaattttgacattagcgaagctgggtggaggatatatagaaactctgtactatctttgcaactaccctataaatctcaaagactattcgagaacaaaaagttagaggaaggcccgcagcaagattccactctgtttcacctggggtgtcctggtcactcaggccctggggcagccatgcagtgggtcctgcctgctttgctacccccttcattctgttcacgcatgttagctgtgggctaccccaactccactccccagccttacagccatgccctgggcctccacatgtccaagagggtcttcagactaggtgggggacagtgtccaggaccttcctcacaagaggggcagttcaggccaggtgtggtgtctcacacctgtaatcccagcactttgggaggccgaggtgggcagatcacctgaggtcaggagttcaagaccagcctggctaaaatgacgaaaccctgtctctactaaatagacaaaaattagccaggtgtggtggcacgtacctgtagtccagctacttgggaggctgaggcaggagaatctcttgaacccaggaggtggaggttgcagtgagcagagatccagccactgtactccagcctgggcgacaaagcaagtctccatctcaaaaaaaaaaaaaaaaaaaagaggggtagtttgggaatctcgcccaggtcagctccctggccatctcagctgctgacaaccagccaactggaaagtttcaactgaaattctgtgccgtcatcaacctgccctcatcagtaaattcctggagggcccaggctcagacaatggttgtattcaacttgaaagcagacatatttgaagacaaagcccctgccatatgtctatgagcaagagccaaacagagcagtgggcttaaggggaggggcacagctgacagtctctcctctctgggagactctgggaggaggattacttagggctgcagacataaaaggaaagtgcttcttgctcctcccgggtctgcaactgggttttgttagccactgtaggtcaacaaaggtaagaaaggagcttcatgttaacccaaccggcccagaatccaggacaatgagctggcccagcaggaggcaggaacatgagaaggcagtggagcctggctgtgtgctcgctgtggtgctgggctctttccatcattatttcattgcagacagcaactctgttttgtcacatagatggagaacctgggactcagagaggttaaattcttttccaaagtcatgctagctagaaagtggaagaagttgaatctgaccccaaagcttgtaagattacagcttttagcttcttacagttcactgaaaactacaaacaacagcataatgtttaagagttcagacaggatgtgaatcttggctttgtcattcagtaactgtgccaccttggataagtcaatctatccaatgcctcagtttccacatctgttaaaaaggagggataatggtagcatctatttcattggaccaagtaaatcaattaacatatacaacctaaaagaatacctaacatgaaataagtggtcactataaataatagctgctattattacatttaaagagttattacaatgatttaaaaatctatctttgcagatttatctcctgttgcttgcttaacttctagaacaacctgtagtttcttggacttcccctgctttcctgcctcaacatcttgattcactgtgtctacaggactttgtaggttacaggtaacagaaaaacccaactaaaaatggcttaaacaataaagcgacttcaggcgagacttggtccagtcactgaatccaagttttccttcatttatctggtttgccttgtgtatttgcctcttgtgtattataacatcattgattctaactgggctacaagcctgtccctgaagtaatggctctgatcaggaagatgggaaatgctgattgacttaagccactgaggacccagtcctggagctgggactaaaggtcagctttctccagttatgtgaagaggaagcagtagtttctgagaggacaaccagggccctgttgtcagaagatagaaccaattcactttgctggctgccttacctactattccctcagcccctccatcctcgttttcaccaccgctctgtagttcctccaaccccgtccccctcttcaccaccgctctgtagttcctccaaccccatcctccttttcaccaccgctctgtagttcctccaaccccatcctcctcttcaccaccgctctgtagttcctccaaccccatcctccttttcaccaccgctctgtagttcctccaaccccgtcctcctcttcaccaccgctctgtagttcctccaaccccatcctcttcaccaccgctctgtagttcctccaaccccatcctcctcttcaccaccgctctgtagttcctccaaccccgtcctcctcttcaccaccgctctgtagttcctccaaccccatcctcttcaccaccgctctgtagttcctccaaccccatcctcttcaccaccgctctgtagttcctccaaccccatcctcatttttaccaccgctctgtagttcctccaaccccgtcctccttttcaccaccgctctgtaattcctccaaccccgtcctcctcttcaccaccgctctgtagttcctccaaccccatcctcctcttcaccaccgctctgtaattcctccaaccccgtcctcctcttcaccaccgctctgtagttcctccaaccccatcctcctcttcaccaccgctctgtagttcctccaaccccatcctccttttcacgacccctatgtagttcctccaaccccatcctcctcttcaccaccgctctgtagttcctccaaccccatcctcctttttaccaccgctctgtagttcctccaaccccatcctcctcttcaccaccgctctgtagttcctccaaccccgtcctcctcttcaccacctctctgtagttcctccaaccccgtcctcctcttcaccaccgctctgtagttcctccaaccccatcctcatttttaccaccgctctgttgttcctccaaccccatcctccttttcacgacccctctgtagttcctccaaccccatcctcctcttcaccaccgctctgtagttcctccaaccccatcctcctcttcaccaccgctctgtagttcctccaaccccatcctcctcttcaccaccgctctgtagttcctccaaccccgtcctcatttttaccaccgctctgtagttcctccaaccccatcctccttttcaccaccgctctgtagttcctccaaccccatcctcatttttaccaccgctctgttgttcctccaaccccatcctccttttcacgacccctctgtagttcctccaaccccatcctcatttttaccaccgctctgtagttcctccaaccccgtcctccttttcaccaccgctctgtagttcctccaaccccatcctcctcttcaccaccgctctgtagttcctccaaccccatcctccttttcaccaccgctctgtagttcctccaaccccatcctccttttcaccaccgctctgtagttcctccaaccccatatcctcttcaccaccgctctgtagttcctccaaccccatcctcctcttcaccactgctctgtaattcctccaaccccatcctccttttcaccaccgctctgtagttcctccaaccccatcctcctcttcaccaccgctctgtaattcctccaaccccatcctccttttcaccacccctctgtagttcctccaacccagtcaaaattcgattcacccttttgggtccctcctaaatgcctgtgtgcctgggacatagtgggtgtccaataaatttctgctgagtgaatgaacttccctcttcaagaaacccttcctgatgctaccgataaaacaatttctgccttctcccaacttccacagatcttgtatgtaacttgcttatggcatttagtgtctttctgttgttgcttatgtgattgttctgttctcttcattagactattcaatactttatatgtggtctttttttcctaccctttctttcctggtatgcaagaaaccccataaatctttggtgatttatttaataaatgaaagaggaagtgaatggcagattaatagactgaaaacagccatttaggtgctgaattgttgtagatttaaagcttgggtctgggtgaaattcctggggaagagagaagagccataaagaacctgggcacaccagcatctgagggctcagcaggagagactaaaagagcaggagcaggaacagccgtctggcaacctctatgctcagcagtgcatgtggccttgttgtggcagctggaagctccccagctgtaggaagatcagtaacattttgcaaaggagaatgaggagagggcagatggagagccctggacttcattctgaaggcttcaggaagccaaccaagcatttcaagcagggggatgagtggtgagactagtgattttgatccatcattccagcagttgttcaagttcagctggaagaagagataccaagtcagaaccaaggctgggttctaaaaaagcggccgggcgcggtggctcacactgtaatcccagcacttcaggaggccgaggcgggtggatcatgaggtcaggagttcgagaccagcctggccaacatggcgaggccccatggctactaaaaatacaaaaattagccaggcgtgttggcacgcacctgtaatctcagctactcgggaggctggggcagaataatcgcttgaaccagggaaacagaggttgcagtgagccaaggtggcgccactgcactccagcctgggaaacacagtgagaccctgtctcaaaataaataaataaatacataaatattaaaaagagagttatagtggagaaaagtggtgaattgagaggtgcttaggaggcagatctgcaggacatggtgactggcaggtgtgaggaagaggagcagctacaaatccgcctttcatggattctgagatccgggagcctcagtactcacatgtccaccatcctcctcaccttcctctcctcctcccctcctcacctcctctcctcccctcctcctctcctcctcacctcctcacctcctctcctcctctcctcccctcctcctcacctcctcctcttcccctcctcacctcctcctcttcccctcctgccctcctcctctcctcctctcttcctcccctcctcttcccctcctcccctcctcctcccctcctcctcctctcctcccctcctcccctcctcctcctctcctcccctcctcccctcctcctcctctcctcccctcctcctcctctcctcccctcctcccctcctcctcctctcctcccctcctcctcccctcctcacctcctctcctcctctcctccccccctcctcctcacctccttctcctctcctccttacctcctggtcctcattagaaataggcacaaagagcagggctaggaattaagggtgggtgatggagtagtaccttcatgggaccagggaggctgctcaggtgtatgactctagacaaaggagtcccacaagttcctggagcacagccccatttacttggattcaacagtctcatctgggaagaaagtgagtcttgcagagccctgtcccctctgggccccttggggccctgtttgtgagtggcatgtctgccagggagagggtggctgtgctgtcacaggctagaggtctgaggtggccagtagaaccagtagccaggtagagaattgcaagaaggcctgggccaatggcatccaatgcccaggttaaagggctgtcctgggggctcctccagtaaatgggaatgaaatgtaggacttttcccagagcctgggatcttttattccttggcaggggtagtagcaatcactttcactatcaccatagtgacattaatagtcatgacttactgatattgtgcattggtcactatgatccatgattgacacatattatccaacgcaatcttcacaacactcctttgaggtagatactatcattatgcccactgtgtagatgagaaaactgacgaggcacagtggctcaggcctgtaatcccagcactttgtgaagcccaggggggcagatcacctgaggtcaggagttctagaccagctggccaacatggtgaaaccgcatctctactgaaaatacaaaaattagcctggcatggtggtgcatacctgtaatcccagctactcgggaggctgaggcaggagtattgcttgaacctgggagatggaggttgcagtgagctgagatagcactactgcactccagcctgagtgacagagtgaaactctgtgtcaaaaaaaaaaaaaagagaactgaggcacataagtcaagtaatgcatttgtatatacctggatttttgacctgcaggttagggattaggaaatggtaaccaccgtaatccatgtaagcaaacactatactgaattctatgggaaaatttggctttcccaatgacaggggaaagaaagttctattccccttgggaattttggacagtgtgttaatgtgccctggatgtagaaggagattaatatctttcagaaagagagaaagcatggcaaacattactagaatacctagtattctagcattactagacaaccctgcatgtgccttgtctctaacccagcattcaaagatttcactgaaaagtgaagatttcccaccctgtgaacaagagttgtctgatggcatccattagagtcaaacaggcacccccaaaaccacagccctgggctcatataggcactggaatgcattatcctgaacaagaaactggccccaccaaaagcagttgtatatcattgttttctgagtcagtctgcgggagttgaaactacagactagtgaaataaattaattccctaatgttagcatacatacaaagaaactctgatataattaacacaatgaatgtaacaggtattagttacagaatactagctaccataatgaacaaacctgaacttttagtggcaaaacacaatagaagtttctttcttgtgaagctcatggtaggagttcctgatgagtggttatagcagtggtggtggtaggtctctgctccatgtagacattcaggcacccaagctgatgggggttctgccaccttccatgtgtgatttccaaggttatcctgagtctcaatatccagcaggcagattggaaaagagggaacatggagtatctgtcttagtctgctcaggctgccataacaaaataccgtagacgactgggtgacttaaacaacaggaatttattttctcccagttctggaggctggaagtctgagatcaaggcatcagcagggtcaggctctggggagggctctctccttgggttgcagatggctgccttcttgctgtgtcctcacttggcctttccttggtgtgtgcatgtggaatgagaaacacttctcttcctcttcttgtaaggccacctatcctattggctcccggcgctattcttttgacctcatttaactttacctcctaaaagccctatctccaaacatggtcacaccgggattaggccttcaacatgtgaattctggggtgcattcagtttatagcaggccacctgggaaggttttatgagtcaggcttggaagcagtataaacgctttggcccatattccactgacggtacctcagtcccattgcacccaactgcaagggggctgagaagtgcagtccagctgtgccctgggagagtgaggtgagtttggggaacagctttgtcagctttgtcattccacagtgcctgcgagtctctggtttcaccgagagggagagggcatttacgttaaatttcagccttggcaattgtggtatctcataataggcataaggtagataaaggtggatgtcttagttatctactgatgcatgacaaatcaccccccaaattaaatggtttaatcaataaccagttatcctctaacacagtctgtaagtgtagctttgctgggtagttcgggctcagggtctcttaggacactgtcatgaagctggggctgaagtcgtctgaaggcttgaccttgaccttgacctggttggaagatctgcttctaaaatggctgaatcccatgcctggccagttggtattggctgctgggtgggggtttcagcttctcaccacaaggactctccatagtgctgcttgagtggcagctgggttcccccagagcaagtgacccaagaaagtgagcagggtacacatgctttcttatgacaagtgacacctcttcattgcttcatgttcgatttgtatgaagtgagttgtgaagcactgccacgcttaaggggaaaggaattagactgccttttgaagggaagaatatcaaagaatttgtggacatatttaaaaatcattgtgatgggtgtgtctaaacttaacccataaaacttgacccccaagccaccttataaatattacttggtgatcttaattttgttggtaggtttgtaatgcaatataacctagtcacataccagctgtgggaatttgggctaattcctgagcagttttgtcatctgttgattagggaagacttgtggcagccccactcccaaccccaggggacacctcgtgtctctagtgtgcacaaaggtctggatagtagcagaatctacctcatagcagctgggtgaagactaaaggcagtaagagaagctggcacgtagcatagcatggacttccccactgtgagctgtttttgttactaatggctgcgcctgtgcctgggatctcgctatctctgagctctgttcgttttgcaaagacccatggctgctccgctttcctccttttctccaacttcaggccttaagaatgaaaaagcggtggagtaagagttcgattaactggacttatacgccccttggagattgatggttctgccactcaaacaaaatggttctgtggaaattagcgaggatgtgcgaagttttgacatggccacagtgtggctctgcctgaattttccatctgcactttgttttcgtccttcttttgtgctggggttgctggtttggagttttctgggcagcataccctccatggaggttcagtgtctgaaggaaggaaggccaagcagcttggatgtcacctgctgagcctgaagaagaacttgagtgaaaataatcccactctcctttgttcttctctgtttgctttttgtttgcctgacagatgttcagcctggtccataggcaccgactggcttctcaaagcctcctgagtgagtctcggcttattgatttctgcacatccgtgtttttgtcattgttacttatgatgcctgagatccccagcacctccggccttcccttggaacccctcactctctcctggtacaccccaaacatggggccaacaccaggaagcttggaaagcataactgcagatagtttgggacagcccttatttggaggatctttcctcatgactttaccagatgctataatactagtgctcctatttctgatgtagaagatattatcattcttctagaggactcttctttctctgtggttcttattattctttctggtgtgctcagatgttcacattaataaaaattaggagtaaagtctgaagctagagtggaacagaaaacctggaattagagtctaggttcttgctttgttcagtctatttagcaaaacctcccaatctgtgtctcttgctttgttcagtctatttagcaaaaccccccagtcatgttgtaacttctaagaatttgcaacttaaccaaacagaattaggaactcagagtactgtattatcttaggttgagattaaaattatattgatatcatgtcaataatgatatccatcctgtgagctagggcagagacccagaaatatgacccagaaaatacaagtttattctagaaagcttagaaaatacaaataagtaaaaagaaaaacaaagcaatatactaaccaagacaaccactgttaaccttttcttcaacattctttttgacctttcctacacactccgcatcactctctctcacgcatccaccacgaccatgctcaagccactgtgatctcttgcaggatttatctggaaactctctttccatttgtgtataaatgaatctcactggctgccacagctatttcttggaggaataaaagcaaacgcttggacactgaggagtggattggtaggtgaaaatagtgggttttgatgatacttctaaaattttgattgtatatttaaaatatgtttagaaaatcaagttggaatcatgctctgcatatcagcccagactcctttaatcccaaatgacaggaaactcaattcgtctggacccaagcagtaatagaatgcatagacttaccaaactgaaactccagagcagggttaccttctgggagacaagaataagtggcttgaatgagttggtttctctttctcttcactctgctctctgagctgttgggtccactgtccccaaccatcaaacatggcagcaaagtacctgtcatcattctgtaccactcggggcaagagaggatcctgagtggctccttaagaagaaacatattttcttttttacagaagcctcaggaaactcttgcaatcttatttttcataattgggtgccatagccacagatgtggccagttgggtgggatgtgctgactggcttatgcaaggggacactcctgagaagccaaaccaccagccatgtggtgaagatggaaagaggtggttcttagaaacaagttttggtgctgttcctagaaaaaaggaatgaactttggacagcaaacttttcttttgagctttttttctttacttaataatgctggctgggtgcagtggctcgcgcctgtaatcccagcacttcgggaagccaaggtgggtggatcacctaaggtcaggagttcgagatcagcctggccaacatggtgaaaccccgtctctactaaaaatacaaaagttagctgggcttagtggcatgtctatagtcccagctactcgggaggctgaggcaggagaatggcttgaacatgggaggtggaggttgcagtgagccgagatcacgccactgaactccagcctagtgacacagcgagactctgtctcaaataaataaataaataatgcgacatcagccaggcacagtcactcacacctgtaatcctaacattttgggaggcaaagatgggcagatcacttaagcccatgagttccagaccagccagggaaaaatggtgaaacattgtctctacccaaaatgcaaatattagccaggcgtggtggcatgtgtctgtagtctcagctactagagaggctgaggcatgagaattgcttgagcccaggaggcagaggttgcagcgagccaagatggcactattgcattccagcctgagctacagagcaagaccttgtctcaaaaaaaaagaaggaaagaaagaaagaataaagaaaatgttacatcatgaacaactttgtgtgcacaagcacattgttagagttttgttgatttatttgtttatttttattcatttgtttttgagacagggtctcactccgttgcccaggctggagtgccgtggctcaatcacggctcattgcaggcttgacctcccaggctcaagtgatttttcccacctcagccttctgagtaaccggagtagctgggactataggtgcatgccactatgcccggcaaatttttttattttttgtaaatcagggcttcaccatgttgcccaggctgatcttaaactcttgggttcaagggatccacctgtttcagccttccaaagactgggattaaaggcacgagccacccagagttttatttttaatggatgcatggctcaaaatatttccaaaggttatataatctatcctgtgtgtgtgtgtgtgtgtatatatatatatatatatatatatttttttttttttgagacagagtttcactattgttgcccaggctggagtgcaatggcacgatcttggctcactgcaacttctccctcccaggttcaagcgaatctcctgtctcagcctcctgagtagctgggattacaggcgcccaccactacgcccagctaatttttggtgttttagtagagacggggtttcaccatgttggccaggctgatctcgaactcctgacctcaggtgatccaaccacctcggcctcccaaaatgctgggattacaggcgtgagccatcgtgcccggctcctatcatatactgttatttaaattgttcacactttattgatatagtattaatattatacaaagcctcttcaagcatatctttttgttcacttgtttgataatttcattaattaatttgaaaatttttcttcagtacctaccatgtgttggtcactctgctacgtactgggaattatttcgtgagtgaaacagataaaacatgctccttcatggagcccatattttatggcagtaaacaaatgcatagtatgtgagtgggtggtgagtgctgagagtgagtgcagggaagagatattgtaaatcttttcttcctcttcctcccaaattattttgcacataactctgtcatgcacctgtcccacgttgagaacattgacctcccctgtgaaaagcaccttgaaggcagacagggatgatagagcttctacactcacattctctatgtgaatgtaactgccaggtggtagctgatgttcagtaagtactcagcaatgcaattccactgcaatcagtactgggctaagaaggcatgaactgtttgtcacgggggttgcacgagcattcccttttcactgtatctatagactggaggaccatgctaactgacttttagctccctgattgaggttgtgatgtcagacatttgttaagtaggcttatgttactcaggctctaagattcacagtgtgagatgggatttgtgtcagtcagggtccagacaggaaagtaaaaactgcactggtaattcaaacagagggaatttaaccagatgaattggttacataggtgttggaagtctggaagggtaaaatgcgaggtgaaacaaccccgatattaggaactaaagaagctgcccgtccgtggctggggatggtggtgcaaaaaaagagagggaaggttaccagaacctaaggcaagcagtgctcagagcagggttccttggcactggtgctcagcatgaagtgggtgggactcaactggggctggagccaattgacagaaacaggagaatatgaggaagtcgctcctctcttctcatctttcaaactcctaggagctcccattggcagaacctaataagaagcctgctatgaagggaaatgcaagtaataaaagccagctatcttgcaagtgcagtttgcagagtgctgtggtttgagtgtttgtcccctccaaaaaacttgtgctaaaattgagctgccagtgtgacagtattaagaggtggaaactttgagggtgattaggccatgcggactccgacctcatgggcggaattaatgttgtcatgaaagggtaagtttgacccctcttgtctgtgccctgcctcccttctcagcccatctgccttctatcattaaaggacacagcaacgcgaccctcgccaaatgctgttgcctggatcttggactccctggcctccgtaatggtaagaaaatgaatttctgttcattgtaaattatccagtctcagatattctgttacagcaacacaaactagactgagaaatgtagttttagccccagcattacagaacagaatatagacaatgagtcgagagactaaggtaaacagtaggcacagtcctcctactcgcttccattgatttcctttacccgtgtttgaactgccacacaaaacaactcatgcttattcccaataagacgcagccataatttgtaccaatgacattgctcagccagaaaggcgagatgacagttccattagttgctgcacccatctcagtgtgacgtaaagtcccacttgagtccaagcaaaatcccacccaaatgttctaaatctaaaagctaagttgtaaagttaaccaccatcagtgattattacgtaaaacaatggaagaaaagagcagaggaaaataatatatataaacacatacataaccaaaaggaagaaaattcaaagctgctatggccttatttatcctgtaacttatctctgggccacagctgacctcaataacattctttttaaagagaaatttagtaatttacagaatatacgcatcagagagtattgtatatctatgaaaacactgacattaagggatgtccatcaggtattattgaatgagaaaggcaattttcagaaaagtgatacaattattacatgcttgttaaacagtgacccaaaaggtcaaatatgtctctgtatctatatttgtatatgattatatgtgtattaaaaatattgaaaagtggccaggcatggtggctcatgcctgtaatcccagcattttgggagggcgaggcagatggatcacttgaggtcaggagtttgagattagcctggccaacatggtgaaaccctgcctctactaaaagtggaaaaactagctgggcatggtggcacatgcctgtaatcccacctactctggaggctgaggcaggagaatctcttgattcttcccgagaggtggaagttgcagtgagccaagattgcaccactgcactccagcctgggtgacagagcgagaccatgccaaaaagaaaaaaaaagaaaagaaaaaaatatatataaaggtatacagaaattttgtagagcaggtctgctggtgataagttccttcaacctccatatgtttaaaaatgtctttactttgttttttgaaagatatttttgctaggcatggaattctaggttgacagcgttgttctgttggtacttgaaaaatgtggatccactgccttctgtcttgcattatttctgacgaggagttggctgccattctaatctgttcctttgcacattatgtgtgtttcttgactgttttttgtgttttctttttaatcattggttttaagtaatttataatgtaccatggtttattttttttgtttcttgtgcttgagttgtgttgagttttttgaatctatggcctatagttttcatcagatctgagactttttctacagcccactgatgcattattctttactttaaattaatagactattttttttttagactgagtcttgctctgtcacccaggctggagtgccgtggtgcaatcttggctcactgcaacctctgcctcccaggttcaagtgattctcctgtctcagcctcctgagtagctggggctacaggtgtgccccaacatgcctggctaattttttgtatttttagtagagacagggtttcactatgttggccaggctagtctcgaactcctcacctcaggtgatctgcccgccttggcttcccaaagtgctgggattacaggtgtcagccaccatgcctgtctaatagattatgtttaatgaacaattttagacttatagaaaaattgaactatatgcagaaagttctcacattacaccactcccctctcagcacacacattttctcttattgttcacattttgcattagtgtggtacatttgttccaattagtaaaccatactgatacattattgttattaactaaagtccatgctttacagtagggttcactcttggtgttgcaaatttctatgggttttgaggaatatcatttatctatcatgacagtaccatatggaagagcttcagtgccttaaaacccacctgtgctctgcccattttttccctccttctcccaatcttccctatggaagagcttcactgtcctaaacccccctgtgctctgcccattttttcctccttctctcaacctctagaaaccactgctcttttcattgtctccatagttttgtcttttccagattgtcatgtcattggaatcatataggatgttgtcttttcagactggtttcttttacctcatgacatgaatttaaagttctgccacgtattcacggcttcatagctcatttcttcttatggctgaataatatttcattggatataccacagtttgttaacccactagcctactgaagggcagtttttggtaattatgaataaagctgctaaacatttgtatgcagttttttttgtggacatatttttcaactcatttgagtaaatacctaggtgcatgattgccagattgtatgtgaagacaacactttgttttgtaagaaacagactatctttccaagtggctgcaccgttttgcattcccaccagcaatgaatgagagctcctctttctacacatcctcaccagtgtttgacgtcactttaaagattgtggccattctaataggtatgaactggtatttcattggtttaatctgcacgtccctgataacgtatgttattgaccgtcttttatttgttttgggcttttgtttgtttgttttttggagagagggtctcagtcacccaggcgtcaatgcagtggtgtaatcatggctcactaaagcctcaaactctgggcacatcttttatatacttacttgccatctgtgtatcttctttagtgaagggtctgttcagatattttccccatttttaacaaggttactttttaattgttgagtttgaggagttctttgtgtacattatatacaagccctttgccataatgtgttttgcaaatattttctcccggtccattgcctgtcttttcattctcttgagaatgtctttcacaaaacagaagcttctaattttagtaaagtccaacttaccaacatttcatttcacgcatcattattatggtgtatttacaaactcattgccaagcctaaggtctcagtattttcccctacattatcttctggaagtttttttttttttttttagacagagtctcgctctgtcgaccaggctggagtgcagttgcgcgaccttggctcactgcaacttccgccttccggtttcaagcgattctcctgcctcagccttcctagtagctgggagtacaggcgcccgccaccactcccagctaatttgtttttttttatttttgtattttaatagagatgaggtttcaccgtattgcccaggctggtctcgaactcctgagtttaggcaatgcccccgccttggcctcccaaagtgctaggattacaggtatgagccaccgcatccagcctttgttttatgtttaggtctataatctattttgagttaattttgagaaaggtataaggtctgtacctagattcattttttttttgcataataatttccttttcctacttttcttcccccctggattccattcgcccttatctgttacctcagcttgatggagttttttcacattgtgaggtaatccaagccttcatttctgaagggtctgaatcctttgtgattgtacctttggtacattgcttaattttccattcatctttacttggatctggaaatatccctgaattccagacatagtctctcttctctccttccatagcagcaaagcaatttcccccgggtaactgggatcaattatcccagggcacacagtaacccctttctttgtctgttgattcagtagcatgaggagcgtgaaatgaccaggtggcagtttcaacttcaattcatcagaacaattctgtcttcttttgagaaccaaaacctctaaatcagcctaaagttaaggggacacacagcaaaggtcctcacatgggttatcagacactgcagcaagagagaccactttcacgtctctcctttgattcttgggctctggctataggaggaacctttgctggatcgaagttcatacgatatcctgttaggggagcattcagatatttggggtgtaactaagttaagccattccattattcaacagccagatgcttgtagctgctggggtgggaggagatccatgcttggtacacaacagggaaactgagtctgtgtggctccctgccactgtgttcctgccgttttagaagtgggtgaaccaagtcctggctagccgccaaggtactcagaggccctgggctctgaaccttttccaagttgttctggaggtcttccagaataagtggctctcttttcagtttcagagcatgaatggttttgaagcagaagtcagtgaaggcgattgcttagagccagaagggcctggtggggttgtctcaggttaggagcccattctgtgagcccaatgtccctatgcagagactctgccagaaagagcaggggcctggctgaccgtcctgttctgggatccccttcagctggaatgcagtttctgtcactgctgccctctaggaggctttggggaaaccgtcagtatctaacatttcagttgtttctccctgtcctcctctctctctgactcaaggctagggcctgccctcttccctccagttctttctgctgcgttgccttgagactttttcactaggaaacaagctgttgatccagctgcaaatactctcattggttttattgttggatttcttctttttcacagggaggtagtgggggacaggactgttttccatggctccagggtatatggtgactatgttcacctgggacacacacagtcccaggtattagcttacccatccgagcccagggccttcacaggaggaggcctgtgatacgtaagctcttttcctcaaccttaaaaggatatggtgaaaaatatgaccctctggttctcaaatccagtccaaggtttagtttccccagtttcttctctaatcttccaaattcccaaaaagagactggtctaattttagaggctgcttgcgtccccactgaggaaagtaggaaagggctgttgaaggaagattccagatctgcgttggaagtgactctagacagttttgcaccaacattatcaaggtccccaatgtcggcccaggtcagacggccaccagaggcagggcctgcaggaagccaacaaggacctgcacagcccctgagctgtcaggacaagacaaggccgaattctgtcctcaggtttgccatggcatgccataaaatcccacccaagtgaagaggcaggcccagaagagcagtgtggaggcagagtggattaactggaagatatcgcacatagaaagcatgaagaaaccaacacctccccaaacctaccatgttccatggcctaaggatgggcgaataattgggagagtgctcaaatctattctttggtttgtgagtacataaaattactcaggataatttagagagatttttactgtaagactatgaatagttcagtgatccaaaaggcataaaattagacaaaggaggaaagcctcatgggtggagagcaaccagccacagagagcctgcagcaatgacaggcaggtcaggatgctcctgggaggcctgaaccacctggacttggtttttatgtctcaagctgaggagacacctgaggggtctaagactgtgtcagtttagacctcgataggtccatgattagtggatggccctggcagcaccagctaagtgatgatgggaaggctctgagaaccgctggggaagtctgtacagctccagtcatcccaatactgtgaagggcctcacccctgttcatctcgacactgtgaagggcctcacccctgttcatcccgacgctgtgaagggcctcacccctgttcctcccgacgctgtgaagggcctcacccctgttcctcccgacgctgtgaagggcctcacccctgttcctcccgacgctgtgaagggcctcacccctgttcctcccgacgctgtgaagggcctcacccctgttcctcccgacgctgtgaagggcctcacccctgttcctcccgacgctgtgaagggcctcacccctgttcatcccgacgctgtgaagggcctcacccctgttcctcctggtggggtaagggtctcatttctgttcgtcctgatggagaaacagtcttatctgtgatgatctgggtggtaggaacaccctgacaagttttgctcatttcgtgagtgtggctaggcccttgctgctcttttcatccttgattgtggaatggtcctctgacccctgttcatgcaactgatgtttagatgactgtgtatcattagttttctgagaattctgttgaaaacatgcaccttcctgggagtgcccaattctgcctcaactgccaacagaacactacatgtgggaccaggagatgaagcctgaagagggtccactggggctccccttgggtcctggactctcccctccttttggtgtccggaagagctgcccaagccatttgtttgcctctttgccaggtgttgtgtggggtgctggatcgtcagggcagaggaagagcgagatgaggggaaacactcagagttccacacagctgctgtaaccagatacctcagccacaattttgtgattgataaaggatgaaagaagatgaaagaagaacctggaagaaaaggaattaccaacagtcagctttcagaaatcagtagaaagttttcagaaacaatgtttgatgcttactctggtaggtagaacacaggtcagcatatcctgtgcattttctcattttattctcaaaattacgcttggaggttttgccagcttttgcgacgataatgcccaaatcaccccagtgcttggtgatatacatgcatcatttctcactcagggtcttatggcagaatcctgggctattccatgtgtctcatctggagcctggagcccgggcaggttcttctcatggggtgggagtggggcagctcggagcagaaatgctgctgtccttcagctgggtgcagacacggttcactttccctcctgcccaggccccactggcccaagcaatcctgtgtccacccaacacccctgaggagtggacacgtgaccctcctatggaggggagattcggagtgagtgttcactgaacaataactcattctaccacctatcattttataggtaagaaaaaagaggccctgagagaatgatttgttaatcaatagcacctgatgacagagaccatattcatagtcttggtgtaagactcgccactggaaagacacagtcagggcccagttcaaggcatatacaggaatcttttgtttttaagagatggggtcttgtcatctaacccaggctatagacattttttaaaattgatcagggtttatttgcagatatgtacatctactacagctagtttaagcagccaggaatgtcatacggggattaggagaatccagaatcatcgaaatggatgaaggagcaggatctaggctgaacttcctgaaatgacccagtagcacctccacagacccggcctggtaagagagctgatgcttttgctgcagtcagaattcacataatggagtcagctatattgaattgtttccatgaggtcagttagacacagaattcgtttccaaagtttctaatttttcaagagaaattaaagcctaaatttttgaaactctcctgcctcacgaaaataaataaacaaatagattaattaaccctaattctgaaaactaacagtcagagaacttgaagaacaactatgacctaaccagtgctcattacctcctccattagcatttgtcagtcctcctcatctgcctgaattactgccataaccttctgactgacctgcttgcctctgcactagccctgttaaaactcatccttaatacggaagtcagaaattttacacttttaaaatgtaaatgcgagtattgtatattaaaaactgcccaatgagttgatatcttgatcacaataaaatccaaaattgtaacaataaaaaaaaaaaaaaacaagaaagaaatccagggatcaggaaccagcccccgtgagtgccggctccaagcccatgctgcctcttctacagtctatgccaacagaacagaggcctgagctctgcgtcacacaccacaagaccacagggacactcagcatcgtaaagcgaaagaggaacaggtagaataaagggacatttgctaagtcttgtggtatttaataactaaaaacaaacttttcccaagaaagttggcttccaattctcttatcagaattggaggaggttcaaattgaattgtcaactgatagagcattacacataaatcttgatgagatactaccatgtccatgtgatttttttgttgttgttgttgcgatagagcctcgttctatcatccaggctggattccagtggtgcactctcagctcactgcaacttctgcttcctgggcttgggcagtcttcccacctcagcctcctgagtagctgggactacaggtgctcaccaccacacccagctaatttttgtattttttgtagaaatggggttttgccatgttgtccaggctattcttgaactcctgggcttaagcaatctgcccaccttggcctcccaatgtgctgggattacaggcatgagccaccgtgcccggcctaccatgtgatttttgacatataactctggaggagttcaaacaattgagtcctgttgctcaatgaaactctgtatgtggacaaagtttcctccatgcttatagccctacaaataaacactaggaaaataattgatgctggactctctatcattccagtaataggtattagccacccacagaaaaactcattggaaaaaactcccaacctcgtccatctcatcaagacatacattttaacataaatttacttggaatgttatttatttgtcaaattgtatagcacacgtatgctcttttgttcaagtatatattactaacaagttagtactgatgtaatgatcgtgcaattcagaataaatttcttatgtttagaatagggtcagattcttaatttagtgtgttcatgaacttgaatgaaaaaattacattttttcccactaacctctaagtgaaagttagcatttccttccattatacatgcaagcaataaatggtagcggtcttaaagtgtctgtgactttgtcaccaagagaaatcagagatagtttctatcacattataattgttgcagataacttgaaacatcgtttctgcttagcattgcttcaaagttgcaatagttactggacttacatattgttactaggattaacaaactagaccttgttaatgtgtgtgtgtgggaaaaactctcctcaaaccgtgtttctcctctgctctcacaccacagcagtcatcagcacagaagccttctgtggccaaatgtgtggggttttccccacacacctagcagctgatgccagctgagtgtgctctggtgttctgacaccatcttcccagagttagcatcagatatcacaggttgagggctcagtccccaagactgccggccccctgcaccagtcacaggcccaggcttctggaacttccaacaggctgccttcaagttgggcttcccatggctccctctttgggttcgattaatttgctggaggagctcatagaactcagagaaacacgttaactgatttattgtaaaggatattgctattgcaaaggatacagatgaagagacaggtaggtcaagatataggggaaaggacacagagcttctaaggtaggtcaaggtacagggaagggacacagagctt

SEQ ID NO: 375 - DNA, 1480 bp, Homo sapiens
atgaacagatctaatttggcaagactagatgaatttgagaggagtaaaactggaggacggaagtttcgtttcaggaatctaaggttgaggcaagagataatgacggcaggatttaaagccattataagtatgattagagatttatccaggaccttcggtggcttcaggccactttttgcaaccggaagtggcgtaacgtccggtcaaggcagccatctcgccgtgagacagcaagtgtcggatccgcaggcgcagccgtgcgatgttgtcctctacagccatgtattcggctgctggcagagacttggggatggaaccgcacagagccgcgggccctttgcagctgcgattttcgccctacgttttcaacggaggtactatactggcaattgctggagaagattttgcaattgttgcttctgatactcgattgagtgaagggttttcaattcatacgcgggatagccccaaatgttacaaattaacagacaaaacagtcattggatgcagcggttttcatggagactgtcttacgctgacaaagattattgaagcaagactaaagatgtataagcattccaataataaggccatgactacgggggcaattgctgcaatgctgtctacaatcctgtattcaaggcgcttctttccatactatgtttacaacatcatcggtggacttgatgaagaaggaaagggggctgtatacagctttgatccagtagggtcttaccagagagactccttcaaggctggaggctcagcaagtgccatgctacagcccctgcttgacaaccaggttggttttaagaacatgcagaatgtggagcatgttccgctgtccttggacagagccatgcggctggtgaaagatgtcttcatttctgcggctgagagagatgtgtacactggggacgcactccggatctgcatagtgaccaaagagggcatcagggaggaaactgtttccttaaggaaggactgatctgtgtgctcttatcaccaatcagttcagacctggttgattttgtactttggaactgtaccttggatggttttgtttattaaaagacattttaagtaatgaaaacaggtcatgttaattttcccttacactaatgaggtaggaatttctctgtaaaagttgaccttttgagcaaacttatcttatgaagagggctctggtgtttacgcagccagcttgcctgaagggacctttaaaccatccagaagggagagtatttactagggttttattaagactctaatggttataaatgaaatatcttaagatttttcacttctgggactgttaagccatctggaatagctattttggagaaaaatcttcaaccaaaataaaactgtaaaaaaaaaaaataggcctttatacaagctgtagccagaaatctgggataatttttacaagcactttagtaatgttataattgagacctaagttttgatagagccaaaa

SEQ ID NO: 376 - protein, 239 aa, Homo sapiens
MLSSTAMYSAAGRDLGMEPHRAAGPLQLRFSPYVFNGGTILAIAGEDFAIVASDTRLSEGFSIHTRDSPKCYKLTDKTVIGCSGFHGDCLTLTKIIEARLKMYKHSNNKAMTTGAIAAMLSTIKRRFFPYYVYNIIGGLDEEGKGAVYSFDPVGSYQRDSFKAGGSASAMLQPLLDNQVGFKNMQNVEHVPLSLDRAMRLVKDVFISAAERDVYTGDALRICIVTKEGIREETVSLRKD

SEQ ID NO: 377 - DNA, 777 bp, Homo sapiens
ggcagccatctcgccgtgagacagcaagtgtcggatccgcaggcgcagccgtgcgatgttgtcctctacagccatgtattcggctgctggcagagacttggggatggaaccgcacagagccgcgggccctttgcagctgcgattttcgccctacgttttcaacggaggaacagacaaaacagtcattggatgcagcggttttcatggagactgtcttacgctgacaaagattattgaagcaagactaaagatgtataagcattccaataataaggccatgactacgggggcaattgctgcaatgctgtctacaatcctgtattcaaggcgcttctttccatactatgtttacaacatcatcggtggacttgatgaagaaggaaagggggctgtatacagctttgatccagtagggtcttaccagagagactccttcaaggctggaggctcagcaagtgccatgctacagcccctgcttgacaaccaggttggttttaagaacatgcagaatgtggagcatgttccgctgtccttggacagagccatgcggctggtgaaagatgtcttcatttctgcggctgagagagatgtgtacactggggacgcactccggatctgcatagtgaccaaagagggcatcagggaggaaactgtttccttaaggaaggactgatctgtgtgctcttatcaccaatcagttcagacctggttgattttgtactttggaactgtaccttggatggttttgtttattaaaagagaaacctgaagtactca

SEQ ID NO: 378 - protein, 203 aa, Homo sapiens
MLSSTAMYSAAGRDLGMEPHRAAGPLQLRFSPYVFNGGTDKTVIGCSGFHGDCLTLTKIIEARLKMYKHSNNKAMTTGAIAAMLSTIKRRFFPYYVYNIIGGLDEEGKGAVYSFDPVGSYQRDSFKAGGSASAMLQPLLDNQVGFKNMQNVEHVPLSLDRAMRLVKDVFISAAERDVYTGDALRICIVTKEGIREETVSLRKD

SEQ ID NO: 379 - DNA, 1057 bp, Homo sapiens
cgcaggcgcagccgtgcgatgttgtcctctacagccatgtattcggctgctggcagagacttggggatggaaccgcacagagccgcgggccctttgcagctgcgattttcgccctacgttttcaacggagggtaaaaaccccagagagctgcggctttcactttcgcccttcccccatctgctgaagcctatttaggagtcaccgccgtgatggcgctgccccgggctcctgcaggcctcagaaccctgagctgagggggtccgcacaaggccggtctccctgccgtcctctcatgcgctgtgtttccctcttcaggctcgctttgctcaagtttacttgtactatactggcaattgctggagaagattttgcaattgttgcttctgatactcgattgagtgaagggttttcaattcatacgcgggatagccccaaatgttacaaattaacagacaaaacagtcattggatgcagcggttttcatggagactgtcttacgctgacaaagattattgaagcaagactaaagatgtataagcattccaataataaggccatgactacgggggcaattgctgcaatgctgtctacaatcctgtattcaaggcgcttctttccatactatgtttacaacatcatcggtggacttgatgaagaaggaaagggggctgtatacagctttgatccagtagggtcttaccagagagactccttcaaggctggaggctcagcaagtgccatgctacagcccctgcttgacaaccaggttggttttaagaacatgcagaatgtggagcatgttccgctgtccttggacagagccatgcggctggtgaaagatgtcttcatttctgcggctgagagagatgtgtacactggggacgcactccggatctgcatagtgaccaaagagggcatcagggaggaaactgtttccttaaggaaggactgatctgtgtgctcttatcaccaatcagttcagacctggttgattttgtactttggaactgtaccttggatggttttgtttattaaaagagaaacctgaagtactca

SEQ ID NO: 380 - protein, 217 aa, Homo sapiens
MRCVSLFRLALLKFTCTILAIAGEDFAIVASDTRLSEGFSIHTRDSPKCYKLTDKTVIGCSGFHGDCLTLTKIIEARLKMYKHSNNKAMTTGAIAAMLSTIKRRFFPYYVYNIIGGLDEEGKGAVYSFDPVGSYQRDSFKAGGSASAMLQPLLDNQVGFKNMQNVEHVPLSLDRAMRLVKDVFISAAERDVYTGDALRICIVTKEGIREETVSLRKD

SEQ ID NO: 381 - DNA, 835 bp, Homo sapiens
atgaacagatctaatttggcaagactagatgaatttgagaggagtaaaactggaggacggaagtttcgtttcaggaatctaaggttgaggcaagagataatgacggcaggatttaaagccattataagtatgattagagatttatccaggaccttcggtggcttcaggccactttttgcaaccggaagtggcgtaacgtccggtcaaggcagccatctcgccgtgagacagcaagtgtcggatccgcaggcgcagccgtgcgatgttgtcctctacagccatgtattcggctgctggcagagacttggggatggaaccgcacagagccgcgggccctttgcagctgcgattttcgccctacgttttcaacggaggtactatactggcaattgctggagaagattttgcaattgttgcttctgatactcgattgagtgaagggttttcaattcatacgcgggatagccccaaatgttacaaattaacagacaaaacagtcattggatgcagcggttttcatggagactgtcttacgctgacaaagattattgaagcaagactaaagatgtataagcattccaataataaggccatgactacgggggcaattgctgcaatgctgtctacaatcctgtattcaaggcgcttctttccatactatgtttacaacatcatcggtggacttgatgaagaaggttggttttaagaacatgcagaatgtggagcatgttccgctgtccttggacagagccatgcggctggtgaaagatgtcttcatttctgcggctgagagagatgtgtacactggggacgcactccggatctgcatagtgac

SEQ ID NO: 382 - protein, 145 aa, Homo sapiens
MLSSTAMYSAAGRDLGMEPHRAAGPLQLRFSPYVFNGGTILAIAGEDFAIVASDTRLSEGFSIHTRDSPKCYKLTDKTVIGCSGFHGDCLTLTKIIEARLKMYKHSNNKAMTTGAIAAMLSTIKRRFFPYYVYNIIGGLDEEGWF

SEQ ID NO: 383 - DNA, 911 bp, Homo sapiens
ccggaagtggcgtaacgtccggtcaaggcagccatctcgccgtgagacagcaagtgtcggatccgcaggcgcagccgtgcgatgttgtcctctacagccatgtattcggctgctggcagagacttggggatggaaccgcacagagccgcgggccctttgcagctgcgattttcgccctacgttttcaacggaggtactatactggcaattgctggagaagattttgcaattgttgcttctgatactcgattgagtgaagggttttcaattcatacgcgggatagccccaaatgttacaaattaacagacaaaacagtcattggatgcagcggttttcatggagactgtcttacgctgacaaagattattgaagcaagactaaagatgtataagcattccaataataaggccatgactacgggggcaattgctgcaatgctgtctacaatcctgtattcaaggcgcttctttccatactatgtttacaacatcatcggtggacttgatgaagaaggaaagggggctgtatacagctttgatccagtagggtcttaccagagagactccttcaaggctggaggctcagcaagtgccatgctacagcccctgcttgacaaccaggttggttttaagaacatgcagaatgtggagcatgttccgctgtccttggacagagccatgcggctggtgaaagatgtcttcatttctgcggctgagagagatgtgtacactggggacgcactccggatctgcatagtgaccaaagagggcatcagggaggaaactgtttccttaaggaaggactgatctgtgtgctcttatcaccaatcagttcagacctggttgattttgtactttggaactgtaccttggatggttttgtttattaaaagagaaacctgaagtactca

SEQ ID NO: 384 - protein, 239 aa, Homo sapiens; identical to SEQ ID NO: 376

SEQ ID NO: 385 - DNA, 1092 bp, Homo sapiens
atgaacagatctaatttggcaagactagatgaatttgagaggagtaaaactggaggacggaagtttcgtttcaggaatctaaggttgaggcaagagataatgacggcaggatttaaagccattataagtatgattagagatttatccaggaccttcggtggcttcaggccactttttgcaaccggaagtggcgtaacgtccggtcaaggcagccatctcgccgtgagacagcaagtgtcggatccgcaggcgcagccgtgcgatgttgtcctctacagccatgtattcggctgctggcagagacttggggatggaaccgcacagagccgcgggccctttgcagctgcgattttcgccctacgttttcaacggaggtactatactggcaattgctggagaagattttgcaattgttgcttctgatactcgattgagtgaagggttttcaattcatacgcgggatagccccaaatgttacaaattaacagacaaaacagtcattggatgcagcggttttcatggagactgtcttacgctgacaaagattattgaagcaagactaaagatgtataagcattccaataataaggccatgactacgggggcaattgctgcaatgctgtctacaatcctgtattcaaggcgcttctttccatactatgtttacaacatcatcggtggacttgatgaagaaggaaagggggctgtatacagctttgatccagtagggtcttaccagagagactccttcaaggctggaggctcagcaagtgccatgctacagcccctgcttgacaaccaggttggttttaagaacatgcagaatgtggagcatgttccgctgtccttggacagagccatgcggctggtgaaagatgtcttcatttctgcggctgagagagatgtgtacactggggacgcactccggatctgcatagtgaccaaagagggcatcagggaggaaactgtttccttaaggaaggactgatctgtgtgctcttatcaccaatcagttcagacctggttgattttgtactttggaactgtaccttggatggttttgtttattaaaagagaaacctgaagtactca

SEQ ID NO: 386 - protein, 239 aa, Homo sapiens; identical to SEQ ID NO: 376

SEQ ID NO: 387 - DNA, 761 bp, Homo sapiens
atgaacagatctaatttggcaagactagatgaatttgagaggagtaaaactggaggacggaagtttcgtttcaggaatctaaggttgaggcaagagataatgacggcaggatttaaagccattataagtatgattagagatttatccaggaccttcggtggcttcaggccactttttgcaaccggaagtggcgtaacgtccggtcaaggcagccatctcgccgtgagacagcaagtgtcggatccgcaggcgcagccgtgcgatgttgtcctctacagccatgtattcggctgctggcagagacttggggatggaaccgcacagagccgcgggccctttgcagctgcgattttcgccctacgttttcaacggaggtactatactggcaattgctggagaagattttgcaattgttgcttctgatactcgattgagtgaagggttttcaattcatacgcgggatagccccaaatgttacaaattaacagacaaaacagtcattggatgcagcggttttcatggagactgtcttacgctgacaaagattattgaagcaagactaaagatgtataagcattccaataataaggccatgactacgggggcaattgctgcaatgctgtctacaatcctgtattcaaggcgcttctttccatactatgtttacaacatcatcggtggacttgatgaagaaggacacagcaacgcgaccctcgccaaatgctgttgcctggatcttggactccctggcctccgtaatg

SEQ ID NO: 388 - protein, 165 aa, Homo sapiens
  VARIANT (1)...(165): Xaa = Any Amino Acid
MLSSTAMYSAAGRDLGMEPHRAAGPLQLRFSPYVFNGGTILAIAGEDFAIVASDTRLSEGFSIHTRDSPKCYKLTDKTVIGCSGFHGDCLTLTKIIEARLKMYKHSNNKAMTTGAIAAMLSTIKRRFFPYYVYNIIGGLDEEGHSNATLAKCCCLDLGLPGLRNX

SEQ ID NO: 389 - DNA, 418482 bp, Mus musculus
  misc_feature (1)...(418482): n = A,T,C or G
cactgctttaatcatattatttccctgttcagcagccttcagtgctcccccgcctgcattctgataaaagctaaatgttttgctcagccctggcagaagtgttctcccatctcagctccctgtcgtggactggaggcttggccatcccatcagcccagcttcagctgttccgtgtgcccctcagtgctcagttatcaacagctctacttctgctagaggggctaatacagctcaatctcccattgtatgcgttattttctcattaatgctcttatttctctatcttattccacaatctaccgattctgatgggtcctgtgctagggcctggtagttcaagaaagactacttcaactattgaaccactctttggtatgtgcatataggtgtggtactaggaaacagaatcagggccttagtttaataagcaaggctcctctgtacctgtgacctcacaactgtagctgggattacaggtgacagcaccacattcagtctgaacccattctctttatgtcatcaactcatgttatagttttacatgacaaattagtacgtttttcctatcaaatacatttttttcttaaaagttaaaaagtatgaaatgggttggagagatggctcagtggataaaagtgcttgcttatgcaaacatgaggacctgctagatcccagcacccacataaaaagatgggtgtgactttgtacacacctgtgatcctagcactgtgggggtcgagacaggatggctagggcttgctggccaccgacctagatccagggtcagagaccttgtctcaaaaaggacttggtgagcgcatagagcatgacatctccatgtacacgcacacacattcatacacatattttaagatgtataaggcaaaaattaggatggcttcttagctaaaaagatagtcaatgtaaacattttagcatgtttctctttgcaaatatttatatatatatctatatctaacagtttgtgctttcccccaccaaacacagtattgtgagagatttgcagtgcctcacaacaatgtccatgaaatatcaaagtactctttaaaatgtttagatatttaaactacttttcctagagtgtaactccttgatgttaaaaggacaagtacagatgtggctggagtggtacatagcattccataagaatcttcctttagaagatgttttttccttttggatatcatcccatctggcctggagctcactctttaggccaggttggcctcaaattctcctgaatgctgggattaaaggcttgtgccaggaagcccactttttgtggaagacttttaatcaaaagatgatctgaatatggtatggcctacaattaaacccaattaagcttatttttttaaaaaagcataaagcccaatatgcatgaagtctactaataattttctacctattttattagtttttctttattcgaagtactgtttattgaacccagtaataggaaaatgagctataccctaaccctaaaagtcctttgtccttcaagactgagcctctttcaataaatgaaacaaaacatatttctcattctatataccaagttggccttgaacttaattaacaattccctggttagcttcctaacaagtgatatgagtacacatgtgaactacacctgacctcataggatctgtttttgttattgttctccatccccaaaaagaaaaggggcccggtcagatgagttgttgggtaaaggcattggctgccatgcctgagggcctgattcaatctctggattccacacggcagacagggagaaccactgtcttctgacctgcacacacatgctatggcatgtgtgcaggcatgcgttcatgtgcacccacacaccaagagagagaaagagagggacaaagaaaaagaacggaaatatacattcatttaagcattattggtaacttaattttggccaaagtagactaccctaatagtctgtcatatgagcaaaatgagctgtttatacaatttcaatggatcagttcctagcagtgttttcatttttcatacctgtaatagaattgacgacagaacgtagaattgttggtggtttaatcagttctttcaaaatgttagattcagtagccagtgggaatccattgtctaacatttcttccaagagctcatatactatgaccacattatccttaattgcagcctctgaacactcaccaaagtagtcctaacaaaatattcatgatattgaacaagagaaagcaggaaggaaggcttgcttttatataatacccttcgttctgaagagtaaactaatagtagcttaactcatggtttaagatgctagaaatatatagacttgaaaaagttctctatggaaatcctaacatttctcttcaatattttcttattgtatttatactgagctgattcctattatatatcatgacagaaagtactgagacatcaatctgcaatgtgagctataaacttcatttgccctcactaacccacactcaaacacatacaaagctttaagctatttggtttattcatcaaatagaaaatagaaaacagaaatataaaggcgctcatgacaataaagaccttgtgatgatccagagagtgcttagtggagggtactcctgtttcctcatgatataatttgccacacataaaaagcaatgagcagaacagcaacgtgcgctactgtatactctctgcaagtgtttatgagattgtttagttacaaagagaagtcagccagtacacatcagaaatttaagtaacaaatgaaagcatgcgcacgtgtgtatgtgtgtgtgtgtgtgtgtatgtgtccttgaactatcttgggtgatttagtaacaacagtttgacggatacaaacctgaaaagtgtcagcaactcgatgcagaaattcaattacaaagagaggtggcacttcggtctgtatcacagacacaaagaagagcttatcccggtagatactaatgaggtagtggtgaggtgttgaaatgacaggtgggacattttcaacatcagcagctttctcctgagcttcaaagaaatagtcacacactgactggcttacaacgctcttccagtgtttttctagaaaaatgtcgccagagcagtttatgagaaatagactgtggatcattttctgtggaggaaaaaaaaaggggttatgcttactgtacactgaaaatgcacagttgcagtagattgtaactaatgcagagactcacatctggacgatgtacagcgagtaaaagactttggagcactcagccctaaacaggaggtctttatcatatccctcctctcaagactcagggaactatgtagaagagacagaaaagagtccaagaaccagtagtggacaactccaaggaaagaaacagcatcttccaggcacaacagagatgatatgcatatgaacttgtagagactctgacaccacacaaagacctccacagattcacaccagacaaaatcccagggtaaagaaagggacgcagacactaagtcctacccctgaccaaactgcttgcaactgatacatgttaggagagggaaaattgtttttctccactggtgtatcactgggcagggcaggcaccatccacagtggttgacaacacgaggatgactctgcacgctcgcgtgtgtggatgtttgttttgttatttttttgtctgtgttttctatttgtctgatttttcttccttttctttttggaaagagagaacacaaagctgggtaggtatggggaagggaaggacctaggtaggggaaggagaaagaatataatcaaaatatattgtattaaaaaaaattccttggggctggtgagatggctcagcagttaagagtgccgactgctcttccaaaggtcctgagttcaaatcccagcaaccacatggtggctcataaccatccgtaacaaaatctgatgctctctcctggtgtgtctgaagacagctacttacatataataaataaataaatcagtggagatgcagagtttggagtctgctgagctggtttaaaaaaaaaaaaattccttgtcatattgccttgacataaaaaccagacaaaggcaatggaaataatagcagattaagatcacttaagaacacagatggaaaagttcttaattctagaaaacaaaattcagcaacaaattaaatcataaaaaatatgatttattccaagaatgcaagtttatttaacacaggatagttaattagtgcaatatacaatatattgttagttctgttaacttgacacaacctaggtaaatctggaagagaaagtctaattgaggaattgcctccattagactgttctttgggcatatctgttggtcattaatgtaggacccagcccaccatgggtggtgtaatgcctaggctcctgggtgatgtgagaagctaagcaagccactaagcagcgttcctccatgtttcctgcctctgcactttcttcatttcctgacctgacttccttcaacgagcatctgtgatcaggatgtataagccaaataaatttcttccacaaattgcttttggtcacggtatttatcatactgacatctgttggtgatatcattatagacagatgctatagtcaatgtgctcttctggcttcatttaaaaggaagagttgaaggatatgttccatatagaaaccaaaacatgctcttgattttatgctgagaaagtttaactgattagagtagaaacaaaagaggtgacacaggttatgtcaaagcactagccccctggaacacagtggcactccattatcacaacactctctaagacaggtgcttgttttgactggttattttagggttagatttccactcactttcttaatctggtgaaaaattctttccaggaaagtttccaccagagttgtttttatcggtagcagttcaggtttcagaacactggttgtcaacccagccactggatttactgttgttatcctttgtgctgagagcttaacacttccagcactcaacagcacttggctttaaaacctattttaacctcctataataagaaaagatcttaatttttctatccatattatgatcaattgcctaatgtatataagaagcaacacctcatgaaacagaaaaaaattagcctatttctttagccacttatgcttttagtagctgcagttatgttgttccttacttgattgaccaccaccacaaactgtatgtggatgtgacttttgaactgcaaacacacccatcagagatttgattgtagtgtaactacttcatgaatcctctttatgtgtgcattcttcctgacaattacagtcaaaatattcttggaaggtaagtgtgtcttttgctttttagatagtcgtatgttgccaaactcatggccttaagctatcccttgccacagcatcttaagcaacaggaactacagtcatccaccacacccaaggtttctttcagagcttaatggaggcacagaatggcctttatacacagtgagagaatgggggatggaaagatgtttaggtcagtaaagagcctgccatttaagcacgagaacctgaatttggatccccactgccatatcaaaacaggaggtggtgggtggttcctttctgtaactctaacagtggaataaggggttggggactgtagagtggagacaggctttcaggctagctattctagccagtcagtgaggcccaggttcagtgagactgcctcaggaaacaaggtggagaaccacaaagtcacccaacttaaacctctgatccacacacacatggggatccctgaagttgcatgcaccgccccccccccacatatgcatgtacacatacacaaatatgaaacgagaagaatttagttcctctgattctcaaccagaatcttaaccattttcccctattcaacaaactgttctatatttatatattaggcatttggggatatgctaaactgaaaatttctatacttttcgtcagttgcaaatacaaatatagtaagaagcaactcatatgataggataaatagagtgaactattggaatcttcaagggttacacgtacaaagagaatacatgaaagaaatccaaaacaaaatgtgcaactcttaaggttgaagaaatgctggaaaaaaggtaagaatatgaaaacagccactggtcatggggcaaggcttgccttgtttattgttctcagtgaactaatttcccacattttatttaattttttattttgagagaaaatatgcaaatctgatttacatttctggagagattatactaattatactatggaaattggataagaagtcaccaaattatgtgacaccagttaagagatgagtgatggatcagagctggagagatggatgcttggcaggttagaggacaaggcttgacacccttacaactgtctttaactctagtccaagggggtccagtgccctcttctggccttctcaggcactgccctagtaggagcctgtactagaaggttaacaagagaatggagtaaaatatacaatgagatttggacaagctttaagaaaaaatgtatttaagtctgggtatgttgtacagaaataagaagacagctgaaatagttagtcctggtcatacataatttgacccaattcctaatatatttgactcaactgagtacattcaatcactgtatttgattgagtctagtccttcaaagagactgatatgttgttaatgggtattataaggagttatatccaaataaattatgaacatagcaaggaacatatatgaaagaaaaagccagtatttgaatagcaaggaagcggaactaaaaaaggaaaaaaaaaaaaaaaagcctaagatggagctgaagcagaattttaaaaatggggaagggttttagtatctgaagtgtattggagaattttagtatctgaagcatatttatgcatttctaggggaatgccacacagaagtgaagctgtgaagatttaaaaggatgagtagaagtggttttctcagattggagatgactcagtgattaagagcatgtacatgctcctacggaagacccagattatgctgggcttggtgccaaataccttgctcttcaagggaagaggcagggggacatctgtgagttccagcccagcctggtctacaaagggaattccaggacagccagggtggttacacacagaaatcttgtcttgaaaaaccaacaacaacaacaacaaaataccaaacaaaacatacccccaacaacaacaacaacaaaacaaaactgaacccctaactcaacaaacaaagcactcagattcaatcttagcacctatgtcaggcagatcataactccagctccaggggatctattgccttttgtttctatgggcatggcactcatgtgcacatacccacatacaaacacatacaataatgcaaataataaaaataaaccccaaataataaacaagtaataaaaataaatatcaaaaaatgttttacaattttcctttttaaaattttcctttttattctcaagatagggtttctctgtgtaacctcggctgtcctggaattcactctgtagaccaggctggcctctaacacaagagtctgcttgcctctaccacccaagtgctgggattaaaggcatatgccatgactgctggccaccaatgatctaacatttccagtcttttaccctcagcaaatcatactgttccctacagactgtttgataagactttttttttcaataatttagatgtgtattatgtgtatttgagtgtgggtttgtgcatgtaaatgcaggtccatgaggaccaggagcggacagtggatcccttaaagctggagatacagggggtgggattaaaaccatctactgcttcggccgaggaccagagttcagttcctagcacccatctcaggcagctcacaacccaagttttttaaactttaattttgtatgtatttctgtttgtatatgtcatgtgagtgcaggtacttgcagaggccagaaaagtacatcagattccctggagttattggttgttaagacctgaacttgggttctctgcagcatctcccacacaaattagaaaaaaaaaaaaaaccccaaaacacatgcctacttaaaatatatctatgtcttatgcattaaaagggggttaacttttctgattcgcaagtagttttgttttttttctttaagtttttattgtatttgtatgggtgctctgtctgcatatgtatctgtacactgagtgtgcagtgcccaagaaggccagtagggggagtaggatccccgtgggactggagttacagacagttgtcagccactgtgtgagggccaggaattgaacctggttcatcaaaagtgcatctagtgctcttaactgacaagccatctctccagctccaagacttttttttttaaatctataccgagaatatatgattgtcatatttgatgtgatgggtgatgttggttaaagtaattttagtgataactcagtaggatgttggcaacggcatagcagtgtggttcttagctaaaagcagcaagtaggtaaaacaaagataaggagactgagatggctcatcaaaaaaggtgtctgctagcaagcctaaggacctgagtttgagcactaagaccctcatggtggaaggagagaattgtggcccagaagttggtctctgaattctacatgtatattgtggcatgcaacacacatacaacaaacaaataaatgtaaaaaaaaaatgtttaaaaaccaggaagacactgagaaacagacgataatagcagtgggactctctcaaaaggggggcacgttttcttctttcaatacagaggaaggatttatatatttgcctgcagaaaattccttttcttctgtgtaatgtgttttcaagtcaaaatcccaaatgccaccaaaaaaaaaaaaaaaaaattctttccccgcgagaacgccggatttttacagtgactcaacttctcaactaggaagttaaagcttcaatatcaaacaaatccactgcatccaatcagcccacccctcattatgtttccattctccaggccaccttcttagtttacagccctgtcacctgtctcctgagaagctgcaacaccctactcactgtttccccatcccaggccagctcacgcaggcgccaccctataaagagagcgttcttagcttcttcaggggacttgccctccaaggccaaacctggggtcctacaaattcaagtcgtcggtactgcacctcactatagatgacatttcccgtgcctggggtccagggtccgagaaccctacgtggcaggtgcaccgctcccttccggcccagctggctagaaagcccggacgtgccgggcaggcgcggccccggtgcacagcagcggggacgctcctggagcccaggctagagtcccgagccggagctatgcggtctactccccggctttggagaggtctccagcccggagactccccgccctcacactcaccccgacacctgggcgactcagtgattcggtgccgggtcctctctgcaccgcagctgaagcagcagagaatgccgcgaggaccccgcgctcggagtgcccagcagattgcctgactagcagccgcagaggcaccaaggaggtcggctggactagatagacacaacgagcggaacggcgttcagtgagaggctcggtgtctacagaggttgaagatctgactcttccacattactcaggggctgaaggaacggggaggttggcactccctgagcgcaggcgctcacccgcagcctaactccgtttggggtcccttaccgtagtaatcgaggtcctgtagggaagcgcgtagagccaatggttatggactagagtcacggattgggcggagcttggagaggcggggcttagtggaaagggggcggtgacgagctgaggggcggggccaccggactgaggggcgggacgcgcggcagagccaaactacggtgagagtgtgaagatggcagctgcggacgagcccaagcccaaaaagctcaaggtggaagcgccacaagcgctgaggtgagagctgccctacgtgggggaggagggagatggcactcgcagtgagccaaggcccacgtgggctggcgcagctggttggtggctgcgttcgtggggccaacgcgctggacctgcagctcggggagttgcccgcgtagctgctgttcccctcagtgccctcttgttctggactctgctcaggtgcattctcggccctggcagccactgaccaatcagagctgctggcccgggggccgagccttcctctggcgccacgtgcttgtcttcgcgggccgcgctagcgcgaccccaaaggacctatctggagctgcatcctttcctagggtatttagcgggaaggcgcccggcgcctcctggaccctggtaaaagataacattcttggaattcttcagaaggcgttgcagaagagcgttttgagttttccgtcagctttctgaaatcatctttggagacccccttcatgggacccccaagcaacctcaggcttaggttaggaaagtttttgtttgtttttctttttttcccctttgcatatttggcaggagcggagagctctctctcccaacacctgacgcacaattgatgttgcaactttcatttacaaaaagccgttcgtttttttaaaaaaaatttcttcctaataagtataaagtccagcgcgctcagtgtctgatgactttgaagtgctcattggaaggcagtgattttgctacctaaaaatagacgcatcaaactgatttaaaaccgtgggcctgttactgattatacaaggcaaattccatttatttcaacatattttttccatgttcaaaaggagaattgattcacaactgaaaaggaaagttggggggtcccaaatcatgttcttggtggaatgggtctgagcaggtcccttttagtgggtttatttagtgcctattattcttagaaggttattgtgcatgtctaataccacaaacgtaaaacattaaaaaaaaaacaaccaaaaaactgaggatgttttattttaaattttagattatctgggtcagtgagatggctcagcagataagggcatttgctgccaagtcggatgacctgagttcagtcagactccaggacacacgtggtggacggagtgaacctattctgttcttctgttgtcctctggccccgcccactgaataaacgcatactgtctccttagattttcttttaataaaaatgatactttatatattatgatgatccattttaacagtgcttaccatctgaagtaacggtataaagaagcctccatgaaagaaatgcagggattaaccttattttacaggtgaggatattgaagctcaaagaaaacatttaagaaaggaaaattcgaaccctgggcatcaggattcaagtttattatttggttctagtgtgtttacacaacatccaagacatgcttctattcgagtatgcatttttaaaaatgatccatggtaatgattaatacttagatatgtatatgccaggtgctgtttctgcattctacgtattttaactcaaatccaaaccaacctgataagaccatttctataattatctcaattttaccaaaaatgaagagccatatacatatctgtctatttaaaattgtagataatttagaggaataaaattcactttccataatgctaacctattgctttctgcacaggtgaagttaaaagattttgactgtatggattctttaattttatgcagagacctttgagtagactgttcctccctttgttagttaggattgctgaatgataatgcatttcggctgaattgctctatgattttcctggcagttaagagatttctaccaattttgtttaactgtgagagaaaacagcataaattgtaggcacagtttaatgtatagaattcgtcagtggagaacatataaattagtaaaaagcatttatagatattaggaaaagaatttaggaatttgtgagttgtcagttatctttaggaaaatagttcttatttttatttatgtgtatgtgtgtgtgtttgtgtgaatgtgtgtcacatgtatgccagaagagggctttgtatgccctggatctagagttgaagagaatcagttatgagccatctgacgtgggtgctgggagcccaatcagctcttctgaaagagcagtttgctcttaaccattgagccatccttccagcctaggaagtgatttttaacttggggaattttatcttagacgaaacatttagcaaaacttggtgataattttggtggagtaggggagtggagtaaagtttaaagatgctggtgagatggctcagagaggaaaagtgcttgctgccaagcctaatgacctgtgttaatccagatccaggacccatgtggtgctttcaataggaatggtcctcatggacttacctgtttgaatgctaggcccataataagtagtgctgttaggaggtatggccttgttggagtaggtgtggctttattggaggaagtgtgtcactatggctttcaggtctcactatgctcaagctaggcatagtgcaataaggattcttctgtcatctatggatcaagaatcggactctcagctccttcagcactgtgcccacctgtacaccatcatgcttcccaccatgaggataatggactaaatctccgaaacccagccccaattaaatgtttcctttataagagttgctgtcctcagccggacatggtggcgcatgcctttaatcccagcacttgggaggcagaggcaggcggatttctacaaagtgagtttcaggacagccagagctatacagagaaaccctgtctcgaaaaaccaaaaaaaaaaaaaaaagttgccgtcctcatgctgtctcttcacagcaatgaacccttactaagacagcccgtttggtatgcacttatacacgcacacagacaataaacaaacaactaaatgtgatttaaaacaagcgaaaagctggcatggtggcccatgtctttaatccctgcagtttggacgcagaggcagaggcaggctcgggtcaaccaaggttatatagtgagtccctttgtaaaccacaacatctgacagctgtagagatttccttgtttggtctcccatcatgatgctccgaccaatgcataatggtgtttctgggcatcttatcagtacagaagaaatccctctgtgatcgagattgtcaggctaaaactgtcaggattgttgagagtgagaaactgctttgggaggcccatctgacaagagtttttcctttcttattctttaccatttgttaagctgcttgcttttcagggcctggaagttgctaagatttcaaagaatcagattgtaacatgttttcatttgaggagaaagaaactgagtatcagacatttacacaaggactactcaattttcttttctctgctttggaaatcttagccaagctcactgcctcaggggtcacctctaagaagacacagcatcttccaagtagtgttgaacacatgcccagtctgttctttcggtctgtctttcaagtgtgtgctatttcaggcactgtgctaggaactgagtatggagaaagaaaaaggtaagatccaggtgctagtctactcctgtgaactaagcggaacttgtgaaaaatacaaggtgatcattattaacctgactagaagctaactaggtgggaagtaaggagtttgcctttacagggaaattattctgaaggcggggcctcttaggatgggagatataactcagcctgactggagtagaaggtaataagtgtctaggcttcatttggggcattttttattttattttattattattattattattattatttttggttttttgagacagggtttctctgtatagccctggctgtcctggaactcactctgtagaccaggctggcctcgaactcagaaatccgcctgcctctgcctccagagagctgggattaaaggtgtgtgccaccacggccggcaattttgggcattttcacgtgtgagatctttgtattctcaggtctcacaatctcaggtctcccaggctgactttgaccttgatttggaaccaaggatgaccttgaacttctagtctttttgctttcacctcgccagtgctgggatttccaggctgccatcacacagtcttcagaagccaggtttaactgttgagtttctctaagtgacttgctgatctttaagatcacatatatgcaagtgagtccatctcttgtcctaaatcctggccttcagcagttgtccccacattagttagtagcactactaatctcctgttgtctgaagtttagactttaccctggcttagatttcttcttagctttctaagtagattctatgtctccaatttcaagttctgccttacctactgtagacacagctctacttgatcattagagtaaatacttgtaagctatgaatttggtattaggaaagattgagtcccaagagccagttatcgtgattccttctgatctaaatgattaaagattgttcagagggtatggggaaggatggttcagttggtaaaacatttatcttgtaagcaggggcatctgggtttgataccagagcacatatagatgccaagtatagtggtgcagtctactggaaagcagcacagggaaggtgaggacacagtttgtaggctgattggcaagctgtaggccaatgagaaactgtcaaagggggctggctacattcccaagaatgatacctaaggttgtcttctgtactctataggttcagtgaacacacgtgtgtgcatcacgtggggtcatgtcttttggtattacttgcaaggaagcggccagccatttctagtcagcaaacactgagcttccacacacactgggttctaagcatttcacttacatactctatttttcttttcctcagtcccttatgtcacagtacatcctgtgtcttaaaattgcatcataacccaaaacaagtcacaggtaatcagagaataactttagtgattgtcctataagacacatttccccctttggaaaactttctaaaagataatcagaaaagtcactagtgttctttgcaatgtcttctcattataactcgtcaattaaagtttgttgttgcatggagtaggactgataggtaccctcacccttttaaaccctaccaaaccctataccttttaatgtggcctaaagccaagttggccagttctagctataaacgtttcccttatatttacaatttaatcctttaggctttaggctatgaaggaatagaaaacaaattcttccagagacagtttgcataaggtccttttctgggctttatgtaccagggtgcagtaaatgttgtaggagtgagggaaggagggagagagaagggggagggtgggggggggaggtaggtaaactaagttgtgtgactagtcctaggtatccaggcataggcctggaaatgcttgaacttaaggaacatggaaagggctctagcaaaagactggcattcaagctggtaagctggagccatcctggaacaggctccatttgccttttttgattaaaatcctgtctgtgtgcagaatgctcataatcggtgtgtgtgtgtgtgtgtgtgtgtgtgtgtgtgttctggaatcaagtcatttggtgagattcctgctcctaatagatgatcatcttgtgaagatagttacttgctttgtgcatctcttctttcacttataaatggatttagtaagagtatctacttcagggctggtgagatggctcagcgggtaggggcactgactgctcttccaaacgtcctgagttcaaatcccagcaaccacatggtggctcacaactacccgtaatgagatctgacaccctcttctggtgtgtctgaagtcagctacagtgaatttatgtataataataaatcttttaaaaaaaagtatctacttcataagattgttaagtactaagaaaataaatattaaacattgtaaatgttgaataaatctaaaacaaatgttgaacagctgctagcatcatcctcatgcttatcttgtgatgatgacgtactcaattccaaattctttatcagtaaaaagaaacagaaatagcaagaggtaggcttggtggtatatagaagtcctaacagcacaagagagtctgaggcaggaggattataagtctgggccagcctaggcaatttagtaaatttggtcagaggggcctacacatagaacccttaaaaacaaacaggccccctaaaattaaaaaagataaacatctccaacgaataatgacaggggtgaaatgtagatttatactgtgggttttaggaactggtgcaaataacatggccggggagctggagccaaatgccctgggtgaaacaaggacccagattgtggttgtctgagagaaagctgagctcatctgctctctactgttgctttaaaaagctgtgaacctggccccactgccagatggctcatcatcaggaattgtaaattcccttagtgtcacctagtacaagagtactgagcttggaggtcatgggctctgtaactatggtcacctgtctcaaaattgctggaagaagaaggagaaagtctaaagtcatgtgaagaaggaagacccttggaaaataggcacagccactgggagataaatccactgagaatctaatggaaatattacagtgatttcaaaatgactattttaaagatctctcgaaacagaagtggtcattaagaaccaaacaagatattatgaataagaaatatgtaaacatgaaagagatgggtttagagatggagttcttagaattaaacccacacatgaaaacgagattcagaagagatggtatttgagaggaacgtgagtgacctggagcacagccttggagtggcggtgtagctcagggataaagaactgtgcctggggcacggggttcaggacgggtctgtttatctccagcttgatgaagagcggtgtcagaggagacttgggagtggaaggaagagtatgaagacactgaatatgatagtgcacacctttaaccctagcacggggtggaaccataccaagccaggtggatctctatgattttgaggccagcctggtttacatagagatgtctgggccagctaatgatacttagtgagaccctgtcttttttttttttttttttaaagaataaccaaacaaaaagaattcaaggtgatcctcagctatatagtatggtctatcctaggctaaataaaaatactgtctcaaacaagataaaaaaaagaaatattagaataggaatataaataggaaaggtaccaatttatatgtattggaagttcaaaaaagtgatatgaagtgtggtaaagtgtgtggaatgtattgacttttaagaaaagccaaattcctctggttgggagggtatttatttgctagtatggcaaagacaaaaccaaacaagcaaaaatccccaaacctcaaaaccaaaaaaaatactaagaatatagatatgttctattccaattatactaacttgtataaaaaagtggaatattagtaattaattgtggtacctggatagtgctgtggctctctactctaacccttacttgaaggggttaggcataagaatcacttgagtacaggagttgggggttagcctgggcaacataatgagcctctctcacctgcccaggggctctctggatttgggaaagacacacacacacacacagattagcttaattttgatatgttgtgactggcttaattgctgggcatttctaatccttcccattgctagtaaacactcccctttggtacttctgagttagcatcatttaaaatctatttttcatctctgctaccccaaacacaattggggaagtggtccgtgtggacattttctctgattctcacatgtcagcgggcctttaggtctagtctgtcttctttcccatcatggtgatctgtgcctccttcctctcctggttcttagcccaggccagtctcaaagtcccgcctcaatctacctgtccagccattggctgttggctcttattgattgatcaaaagccaattggagacaaggagcttcaatgtttagatggacagattcttgattttgggggccagattaattcaaagcattagaaccaatccccaacaataatagttatatttaagtaaaagaattgtgaggttgttggattgtgtatgtgtgtatgcatgtgtgttaatttctctaaaggaacagaaatgatagagtgcaaacagtaaatacataaaatgtaaaggccaagcagttcagcagaggatctttcctgaaggagaggccaaggttctgggagttgttcactccacaaggccggatgatgtctcacaagtcctaatctggtgttggcgtcccaaagaaatcctgggacagtctttaatccctgtcacaatctgtaataactagattttaacacatgtgtgagattggctctggaacaagacagttgaacttgccaacaagagtgagggtaaacaggcaaaaaacaaaggcttctttcgtcttttatatagcctgctagcagaggcgtggctttctcataggtctttccacctcaaatgatccaataagaaaattcgcccacagattgcccagctgcttgggttttagttgattccagatgcagtcagctttatagcctagatcagccatcaaacataccgattagggctctggagtttaacctggagaatttgatgttcactaaatacatatttggcaaggtgctgaatggctaaatatcaccattacagtatggtgtaccatagtggcaacaccaaatatatctgaaacaaagtaattgtgacttgattgtaggctgtaatcttttgattcgtgtttctgaaatcccaaagctctggaaactagcagaaaaatgtaaagttgggtgtcgtagttagggttaccattgctgtaatgaaacgtcttgagaaggaaggaggttatttgtgttatgcttctacatcactgtacattattcaaggaagtcagggcaggaattcaaacctggtgggaacctaaagactggcactgatacagaggccatggaggggtgctgtttactggcttgctctcctggcttgctcagcctgctttcttatagaacccagggccactagcccagggatggcaccacccacaatggtccaggccctacctcatcatcatttgataattaggaaaatgcccacaggcttgcccacagcttcattttatggggtcattatcttaagtgagcctctctccttcctgatgacttcagctttcgttaagttgacattaaaataaccagcgcatcagaaatgaatcgttttagcagtgagacaaactaatatgaagctctctgtagtagctatcggaggcaagtgtatactttttgctttgtaactgtaaaaagtatctgttaaatggcatactacatgaatccctctagggcactttataaaacttgtactgtcagccttcctaagattggtaacattctgaattctaaacacacatggtttcctgtatttgagaaaggaaaagtgagtagtcacttgtggagtgtttgaatttctgcaggttcaatgatatttttttataagttagttgctattttgtttcctgtagccaaggctagccttgaacttactatgtagccaaggatgagctctttaaaatttgacttgtgtcatggcaagatggcctcctccacctgagtacatagaagtggacacttcaggaaaggaaactagacctgggaaaatctccaaagtagtgtggaaggaacaaaaagaaacaccaccaagtagcaaaccagaacagcattagcaatttatagggaaaagcaaacaccctttctgtaatcattttaagtgtaatggaaatggcctcatcttaccattaaaagagatgtagactaatggattggattaaaaagaaggaaccaagtatatgttgtcttcaagggaaaagaaagctagcaaagatctcaaaaaactaaatatcaaagaatggaaaacaaacaaactgccaagcaaatggaagctgtaaaagagcaggcatagctgcccttacattgctaacgtaaactttaagcaaactaattagagagataaagggggacactgcatattaataaaggcaacactttatcaagaagatgtaacacttgtaaatatttggttatctttggatacactctaacttcctcccacagaccatctgggtgggggtgggagttactgtgctagtgtttgtggggagcctgtcagtgggggtggtggtcatatatgcgggggaagcaggagttagtcttgagtgagccagtataacagtatagccactgctaccaggaccttgtagagaatagagtgaggtggtgtgtgatcctcagagcaagagaaaaactttatatagtatagcacttaaagaagatacttaagacagccctgcagatcagtcaatttaaacaagaagcctcattctttaaggcccagtatctatgactttcctactcagcttgcacagtgctcctctggtgtctgcacattgtcctgagctttattgctgtgtgcagtatctttgtgttttattgaagtcagcagactagaggagcagccctgagcccttctaattgctccttgtgctgcagtttaactagatgtgggttttgttgaattaatgaattcttaaaacgtttttaatccctcctccacgagtgtgtgtagatggcaacgacaagttttaggaattggttctgttatgttggttgcaggtactgatctcagagttagccaaggctacatacttacatccgataaacaaacaaataattaaataataattaaataaaaacaacatttaagcttttttttgtagcatttggtgacagagaatggatttttgtataagtttcaaattcatacctctttggcagtagatagaaccttaaaatacttcatggttccatgaccttttaccttctttgctacatggaataagctgatgtacaaaattagtctgatagtagaaggcattatagctaagaaattcatttctagattctaggaattcctggtttgttttgaaactaatgagctgttgactgcatttgtccatagagaaaattccctccacatatacctgcatcccctatatagacagtaactttattaaggcccagtggttattgttttctttgtttctttgtttcttccttcctttccttctttctttctttctttctttctttctttctttctttctcttaaatatattagagttgcttgtttggtagaggagtgggttttctgaacgagtgactctgcatacaatattttagttacctgttgagatggtgaatctcttcccctgggtttgtttgcagtgtaatgagagtctgaaagcagggaaggccagtgactcagcccaggtttccagggtgctgcgtaatgcagtatgctggcaacttgtgagttaatgacatggttggtcttctaaggaagtttattagtattttagttttaaaaaaacatttgagtctaataactcacccagaaggtgtcacttgccaatagaatattgtagagggattaatacagatgtctaaagttttctcaaatttctttaagcttgatatatatagcaaaataaacatttcattccctgagctccagagctgggctaaacaaccattgcattgaaatacaagaaagttatctctttgacaaataaacagtgctcgtgtgctgtctttgaagttaaccacattagagatttgaacacattcttggcctagagccatgattaaagaagtcttaagtccttttaaaacagttttcaagattgtttttcctcagcacagctgagatcttaccaattttagttcttagtatagttgaagtttaagctgttatgtcataaaggtaaggcagccttctacttgtgactaagtctctgttttgacacactcacaatgaactggttagtgtattttaggtttgggatagcatgtgaaggcccattaaagcatacattaacaaactccacttggacttgtctgttacttaaccctcttgatatatataaatatatatatatatatatatatatatatatatatatatatatataaaataattggactgtttagatttgagctgctattaaagcacaggtttgttattacatccagtaagtactaaatgtttagaattaaatagtattttaagtaacacaaaggaaaggatttgtctttttttttaatgggtggataggggaataggttttctagatgatacaatgaattgactttggatgagttcattcctatgcttgaatatcctaaggatttcttttctctttccaattaaatgagagagtgagagcgagagagagagagagagaatgggagagagagattgatattgtatgtgtgtgtacgcacaccatagcatgcctgtggaggtccaaggataacttgtgggaatcagttctctcctattgtatgggtcctgggattgggctccatctgttttttgtttgtttgtttacttgagacaggatctttccaggtggccgagggtagttttgagctcctagtgtggcccaggttggctttgaatttgcatggatactccttgctcagcctctcaggtgctgcaccacccaccctagctgaaggatgctttgtagagaagtagatttctgtgctcacagacaaggagctgtgcaccatcattcctttccctgacggtgccacgtcccttcacacacatctgacccctttgactatagttctttgtgaagcttgcctgcattctggagaagacttgacggcatcttataaatatcaagtcggatgtgggcgtgtttaactgtttccttgtttgccgttatcttgcctttttaaacattctccttcagataagagtccttactgtgtttctctggcttgcctgtaagttcttaggagaccaggctggccttgaatttagagcctttttaacactgcctcccaagtgctgggaagaagttacatgcctctctttgggcattatgttgcttctttaaattagattaatacagattctttcacacttattcctctaggactgcttggaaagactggagggcatgggatttggagaagggtagggtagggagagggctgagtgcagattcctagagcagttgtaagtgttcccgcctacagctggtatttcctgcaaaccttggcgttggttgtgaaagcaatcacagtccttaggatgagccagataagcttggaaatggtgattcagagttgcttataggtttattggaaactcaccagacatgttttagactccagattgtcagtgcttggtgaggtacttacaaagatggagtctggtatttgtttcacactgttgtgagaattgaagtccaaagaggttaatttatttctctagggaaaatggcagtttaatagttactaaatatcagaggtgagatttggtcccacaacttttaacttcccattgtaatatactctgaaacaaatgaggcattggttttctttggattttgttatagatgaaaataacatgtttaaagaaaatgataatgactttctgtttacattttcttattgttgcttctgacatcatctaagctgctcttagttgaggaataaatccaaacgtcaggcattcctccatgcaagcctggtctacagagtgagttccaggacagccaaggctacacagagaaactgtctggagcaccccccccccccaaaaaaaaaaccccaaaaccaaccaaccaaccaaacaaacaaaaaaagttcatagagcccatctcacactcagggcctctgactcatccttctttgctatgtatattacagtacaaagctacaaattagaagctcttaaagtgacttctatatgcagtaggtacacacactatttaaagagtgtgatttgtaatcagctttaaacttttgactttccagttttcttttacacatgaagcttaaactattttactggtttgtttttgttttacatttaaatatgtgtaccgctctgtgccacatttcatgtttgctgaggccaaaggacaacttgctagaaattggttctcctgccttctgggtcctggggattgaacccagttatgatgctctgcacatgcctttatctgctgaatcatctcagataaatattctctgtggcatacacttaatggtatgtttcaccaatggcttaactcactgagtttgagttttgagcagcttgtatattctaattgataacttggaaaagccaatgttgcttgtgctttctcgttaaaatgtcccaggtaagagaataaattttgatgagtttaagtttgtttcagatattttgtacttttccttgattctaataatttgagtgttatctttttagtattattagctgtcagaataatgtgagatggaggctggagagatggctcagcagttacgagtgcttactgttctttcagaggactctagtttggttgctagcacctgcatcggaaaggtgcttcttgtggtctccgtgggcatcagcaaatacttatctacacatgtgggcatgctagtgcaaaagcacacataaaacatcaaataaaacctttacaggataaaaatgcagaacactgtgcctataatcatacattaaatttctgtactaggacttaaccagcactatgtcttattataatattttatcagttatccacaattttgagatctaaaacaacagtcaacagtggtgtttaggattaaaacattgaacaggcttttgctttagccagtattcctgtcttatacagggaacaattactagtaatcttctaagaagctgataatctgttaatactgttaataatttaaaatcctatcaaaacagcagagatgaaaaatctttgctttagaaataacccactgtaaaaatatccttgagccatgagctgttaaaagaaaaaaaacaacaacaagaaaagcccaagctttccgcttcattattggtgaatccctagcacacagcaagctgaggcaggaggattgaagttttaaatcaacctgggctacattagcaacacctgtctttaaaaaaaaaaaaaaaaaaaaaaaccaaactaccaaacgggactggtgtaatggcttagcaggtataagtgcttgccactaagcttatgacccgagtccattctctgtgacccccatggtggacagagagcaccagagagttcatacacataataaacacccaaaatggaaaataaataaaaaatagtgccatacttttaacccagcagtcaggatgcagaggtaagaagatctttatgagctgattatatggtaagtgccagggcagttaaggctacatagtgagacactgtttcaaaatatcacaaagcaaacaacatcaacaacaacagaaaacaattaaaaagtaacctgtatgaagtattgttaaaatttcaggtagcttatttaacttttttttgtatatatatgagtgttttgcctgtatgcatttctacatgcctgttgagggtattggtgctcacagaggccagaagaaagcattgggtaccctagaactggagttacagatggctgtgagccatagtgtgggtgctgggaactgaacctgggtcctctggaagaacatgcagtgttcttaaatgctcagccatctcttcaacttttcccaggtagcttattttttaaagtatgattgtaaaatttctttaaatagtatttaaaatatcctaaaatttcatttttttcattttttaaaagatttatttattatatgtaagcacactgtagctgtcttcagacaccccagaagagggcatcagatctcattacagatgattgtgagccaccatatggttgctggggtttgaactcaggaccttcggaagagtggtcagtgtgcttaaccgttgagccatctctccagcccctaaaatttcatttttaccctgcgtcataaacttaggaaaaaagaaatagaagggggaaatagatttgtgaatgaggaagggaaagagaaaacaagatacagttgaaaatgagaaacattcttagctcctctgagctattcctgattccttcatgacctctttgtagctttttttttttttaacatattctgagatgtgtgagcttatgaaaaacttctggatataaattgtaatacatttgggctattagcctggtacaaggaaaagagctttgggttaggaaccaggatatcaaggtcttagagagttttgttctaggtttgtgtatccacctgtggatacagaaatgagactgtggtagaaaatacaaaacctgagatctaagaaaagcagtgaacgtattttgtacgaagctgtacctacttagaaagctgtgagactggatttctgcctccttggtaaaattgtgtgagacttgggtatttataaaagtctcagacttgtcagaacaccttgagcttacaccagtgacaagactgttttccatcctgtatgtaattagccccagttcagaagtcaagctgccatggcttgcatttctggtctgtgatgtatgacaagaggcaaataaataatttggcttctttgagcttctgaaaattttcttctgtaaaatgtgatagtgaggcatttcctgccagggctgctgtaactccagtgggaaggaacttgcagcatacacagcattgtgtgtagtataaattaattaattaactaattaatcaaggcagcaaattttacacccccaagctgctagaagatgctcaagtagaactgttcccctttaggctcttgttctggtgaaactgcatacacaggtcaagttatgcgttttcatttaattggtagaaaacagaaaacagggttggaacctgactttaagttcccagcacctgcagggtggcttatgacaggctgtagctacagtcccagggattcttaggccctcttctggccttcacaggcactgcagacatgtagtgtgcttacatacatgtggacaaaatacttaaaatctttaaactattttaaaaatcttaaaacaacgacagaaagcattttgtgctgcagagcacttgcatgcgccgccccccccccccttctcttctccactcagcacatatagagtccgggtagccattgtaaaatcagtttcccagtgtttaaatgacagtggcttcctgtcatgtttctaggccagatgatgtcctctttgtttggttttctttacagtgtggtcgagatctcttaggtttgccctgtgtggaatgggcttccccacctagctcttgtcactgagttctcccttggtagagagagagcttccttgacgatccaatgcaaaggcattccctgcattgatgtcttggttgtaattctctgaataccaccatggctagcagagtgacagtctatgagaggcaggaatgcagttcagttcagcacaactaagtgacctgtgttggttcaaatatcaggtaatctgacccggagtggtttattttaggcatatttaagcacagcacaatttgatgtaaacttgtagattgactacatgtgacagtttccataaagatggtttatgtagattgactacatgtgacaccttccataaagatagttctatagattgacaaactcatgatataagtgtctgggggagggtccaatgtggtcttggccacatagatagtgcaatggtcaccaggctgttaaccacatccactctcggtctctgtgtggataacaagttatgcatcccttcctttgaaagaacagccccatgtgtctaacatatctagttcccctaatgtgtatctgtgagcacaaggtcctatatgcctcccatatagtactttttgatcatttgatggttcttgtttattatttggttattcatctgtaacactttcgatgaatttaaattctgcaagaggaaaattgcttatctttgctggatatctagtgtctagcacagaggaggagatggtacatacatacacacatgcatacatacattattatgtatgtgtgtgtactgaggtatatatgtatagtatatacgtgtattagacaagatctcactgtgtagtcctgactggcctgaaacttgctacatagaccaggctggccctgaactcagagatccacatgcctctgccaccctagtgctgggatcaaaggtgtgtaccacacacagtaaatatttgatgaattaatgagtgcttgggaagtagtgtgtacttttaaatagtttacactgagcaccagttcactgaaaattaaacacttgtgtgggtatgcctgagagaactttgttaaacactttttattaaagttcagtcactgaagtattagtgactttaaaatctccaatgaattgtcaggttccatttaaagattattttaaaatggaacattaaaatgaaatataacctaagactatgcagataatcagaaatagttaacttcttgtaacatgtcttgagatagttgtacattccagcatttatttgaatgatcctctctaactaaaactaatgttaagtggttctttttttttttttaaagatttatttattatatgtaagtacactttagctgtcttcagacactccagaagagggtatcaatgtggttgctgggatttgaactcagaagagcagtcggcgctcttaaccactgagccatcctgccagccccataagtggttctttaaaactacaactcaggagccagatgtgggcgcatgccttcagtcttaccactcaggagacagaggcaagtggatctctgtgagtttgagaccagtctagtctacaaagggagttctgggacagccaggactgttacagacaactcagtttgtactgggacagcagtccatagttctttcattaataagaactgaagtgaatctgatctgtcacatagagtgaacccctttgtgtttcaggtaaggaagctgatgatcaaacgatttgttgaaggttagaaagtttttggcaggcccacaattaaaattcccatctccttggtgctggaagggtggctcagtggttaagaccctattctactctgtagaggaccctagattcagctctgagtcaggttactcacaactgcctgtagctccaacgccaaggcatctgtgtcctgttctggcctcctcatgcacatgcccctcccccaaaacacatacacctcattaaagcacagtaataataaatcattagaagaaaaagaactcccgcccccacatccctagcccccctcctcctttatttttggtaccttatactgtggtatgccttcatttattttgagacagggtctcactgtaactggctggcctctgcctcttgtggtaaatcattttattcagggacacaagttgtaagatgttttcttttgagagtaagataaaaattgctttaaaaatacagtctttttagtatttagtaaggggatgtatgtagggggttggtctgctgcatttttaagtatcatgtgggaaatagtccctgtgttcataactgggctattcaaggaaaactccaaagtggtatttttacttttaattattgtgaaatgtgacaaagtaattaatgaagaaaatcatagatattttattattattcctgtgtttaaaagttcatgtatgggctggagagatggcttaaagcttaagagcactaactgcttttccagaggtcctaagttcaattcccagcaactacatggtggctcacaaccatctgcaatgggatttgatgccctcttcagagacagtgacaatgtactcatataaatcaaataaataaataatcttaaaagagttcatgtacatgaaaaatgagacatttacaataatatccagaacttctaaaaataaggatagttttgttagttgtgttcttaaaattatagaaattttaaaagagcaaaaatgttttaactttttcagccattttaagatgacaagatactgggcatctaggtaggtggtagagtatttgtcttaggtctaactcccattactacatacatacacagatgtgcagatacatacataacaacaatgttattaaataaaattaccatcatggagctagcattgtgctataagcctataatcccagcacttgggatgctgaggcaagaggattgtgaatgtaaggccagctatttatagggttatatagggaggttctatctcagttaaaaagtatctgcacccttccagtgcacatacgttatgtgtagcaaacacataaaattaaagcttccaaaaacaaaaataattaatattataaaagtgctaatgactataaagccagtgtgtgggagggcctggtggtgcacacttgtaatctcagggtttgggaagccatgccagaggcttctgagcttaaagccagtctgtctgggctacagtagtgagttctaggacagctggaggtacagaatagaaagtccatgtcagagaacaaaaaaccctcttgggccagggagacggttcagtaggtaacagtgcttgctaccaagcctgagaaacctgcaaccaatcccaggacacatggtaggagggaactaactcttgctagatgtcctctgatctccatgggcacaccatggaatgtgtgggacaacacataaataatatgataataaacaaaaacagtgggtgttagaaaatttaaaggctatatcaatattgaaaattttatgtaaactttctttccatggaaagaaacccaatgatgattgttaggtgtgtttttcccagttttttttttttttttaaatgaatgcatggtatgcatttttaaaaactacacagattatattctgaattttccttttttaattttatagtatgtctttaagcattttccggtttctttgaaaaaatatggaaacatttcataattgccctatatatagtattctcttactgaaccttgctactggtttacagtacacttttggtattgttaatgatcaagtttgtgactggatatagaatatttgttcatgttggtctactttttcataattgcttcaaaaaaatggaatttctgatacgtattggcaaaggctttcccgaaatgtggtcatttatcttcccactggaaatgttctggagtgctttttcatcttattgtacttctgaagacagtgccttttaagagcattactgttatttctgggcccagagtatctgctgaaaagactcgtaggtggttccactcctttgttctgctatctagagtcagtcagctacttggggctcactgtctgtctgctttatagcagcctcccaaaccaagattagataaagtggacagaagagcagttgagaggatcagtgcacgtgcgctctgccctctagcttgttcctcagcctcttcagtttgtctttacccagctgactctggaggaacagtcacatctaagtccaggttgttgaagtaatatttttgtgttcaagtttctcaagtgactggtatctatatttttctgagcctcaagagaaatcccattgcttcacttttaacattaaagttaggtccactatgtttacttggtcccttcaaattttttgtttatttgtgtgtgtgaatgtgtgccacatgtgtgcaggttccagggagttcagattccctggagctggagttatagatgtttgtgagccacctaatgtgggtgctgggagctggacctaggtccggggagagtggcaagtgctcttttcactgagacagacacatctcttcagctcccaagtagacactaaggcactccacccatcctcctgttttgaagctcaaggatagtttattagagtttaagaggaaaacctcactgtagacaagctgtaaatctttaagctgtctggaagggaggagcagaaagccttgctgccagagataaggggatatgaaggccaatcacctcgcagcaggcgcccatttaaaaattaaaaagtatttgttggagtggagacattttcatggttcatatgtatctggaggtcagaggatgggcaacaatactcgcctccatccgtgggttctgggactagagcgcaggtcctagccttggtagcagtctaactggtgagctatcctcctcccttcccctcctctccttagctgaagattgaactgagatcctcatactcccaagacaaacactttactgcagagccatgccttcagtccctctcccaatctatgccttgatagtgttggacttgtttctgatatgtcagaccaaggagattgatcacggctgtatgtgcccagtaaatgagtgctgctggatgttgtcctcagctaacataaatattattacacagagaataaagaaagaataaacaaaagctatttggagcataaagcatttaccgattccatcccgtgttttcccgcagcttttattagtgattcattatcggattcttaactcactgtagctcactataaactttaacatcaatctttttcctgtagctttaaatgcttgtttcacagctcaggtattggggaaagcgaggtaatctgacatgtgtggcaaatagggcattgggtagtttggttaggaggatataaactttatttagtgcatacgtggatcacctgggtatacactaaaaattccggttgtccggacctcacctcacttagattctgattcacagtttaatgaaccctaaatacatttatattagataactgtttaagtgtttctgaagttcaagaacgtttgggatcatattgactccctgaggttgcagcttggaattcagcgctcctttgcagctgttgccttgcttttagttttccacggcctgaggtttcccaggtggctgcttttcgtctgcagatgaggttttgcggactgttaaaccacgtccaagatttgtcctgacagcgtccctttccccagactgttaaagggacctgagctcgccgaggtagagcgtgcccatgtgactgcgaaccgggttgccagcggcgcggccatttttgaggcgggcactcaaccttattgccctggggggccgggagggcaaggggaggtggttaccaggactcaagatggccaccgtgcccgctagccagccctctggctggtcagctagcccgcgtggcagcgagcctgaccgagccccagcgagccccgcgggcagcgagcctcggcgctcagccctgggggcggcgctacagcggaccgacgggggcggggcgtccgccctcctttggccgcagccaatcagcgggtggggccagctcgccccgggccgcccgcgcgcggggtgtgtaaggacgagctctccgacgctgagtgccagagctagggagcagttgctgtggtacctactgctacctgggcagacgctgagcatcggacatcaggcgcggggcgctgcggtgcgggacgggtaggtgcagtcatgacgtccaccaggtaagcagagggcggccgcttcagctatgccccggctgggcgtgagcttgcagattctgagagaactattgccccttccctaggtctagagcctccctttgccgctggctcctcttctgttcccctcacacttctcactggttcatttcttgtttcttccgaagtttttgcattagtagcagaaggcgctgccctatttgttgtcacttacatgaggtgacccttgctcagattccagggtctgtggcttacttgtgtgtgtgtaatgaatttctcatgaaaaactgcctcccgcccccatcgacccactgtggggtgacccgggccccaagggaatgtgccctgtacagtgtatgcccattcctctgtgtcatgccttctgacagaacttcatggttagccatgagcagatctgtagagttggcacctctcacgcagattgttcccaagttgtgaaattgtgtgtccctaaaatatttgcctatgactggaattagtactttggttctcgaaggtaccatatgtttgcctacttttatattagcgtcacaagtggaatgggttttgatataatgaaagcagactcacccaatcacaggtccagggttttgaatggtcctctgtttttggttgtgttggtggtggggagcaaatggttatacctaagtgggcttgcccactttttttttttttttttttttggcttctactgaatgcttatgtaaatgtgactgtttataaaaaaaaaaaaaagtaagtttcctcatttacccagtgttttggaatgcctttttaaaaagtagctcttggcctttattttccaaaaggcagggaggccccagcacaaatttgaagaagtaatttggggccatgagctttaaagggcctaagtcctagtaatttaatggctttttggaggtaattctgttactcatttagaaccttttcctcaggtaggacacagtggtgctgccttttctcttaaatttatagttatgtagtaaggtggacaaagagtactgatcattcattatgcaggagaaagccaggtgtgggaatatggagacccacatggcctttttggtaaatgacgttgcagcaaatctatcttttaaagctaatggcattttaccataaattagggtagtgctgtatggcagcagttaatttcccttcttttcattcctgtgtcccttcccatccctacaggattaggtgtgctggccaaaaatgctttctaaagactctcttttttaatgttctgggaattgaactcagggccttgttcccagcaagctcaccctccctgtggttttaattgcccatttcactccaggccactcctcactggccaaatgtccaaatgggtagctttgagatgtgtttgtagtgtaggaatgtaggagttgttttcaaaagttggagttaacaccaaccttggatatatatatatattttgaaaaggcagataaatgactttctttggtctgctttttcagggtctggttaaaatcttgagctactgagacgtggcttgaaaaaaaaaatcacactttgctgtaggaactaaattgaagaaaagttagtgcctagcacaaaacctgttactagcaaagttaggaagtgagtctagatcttgatacctttgtagaaacagtacactaaattttctgaagaaaatttattttggtgttcagaaattacaaaatgtacagatgtgagttatctgtaggacccgttttgcttcctgatttcttgtagcagggaaggatgagcaaggccacgtgacactgggtatgacagttttgaaggtgcccagtgaggacggcagctactgcagttaggtcatgtctttatcagttatcagttccccttcactgcccagcctaccagtaatgcaaaagtgcagtcttaataccctcttctggtgatcccaaattatcaaaatctgacctcatgtcctgtgttcttgcctttaccccacacttaaaataattgttgctaaatatagcagcgtgtgactttgcaatggctatcaaagaatataggattagaaaccagacatacctacaatctaattgaggctcttttctaattctttttttatttttaccatgggcattgtttaatgaaatctctcactactgtgataccaacctccatcctacagtactacagggtaattgtactttaaaactttgttttgaatttgacattttgagacagggtctcactgttttcctgggctaacttagaacttgctacagtagccctctctggctgtcctcaattggtatccttttgctttgatctcttgagtgctgagatgataggtgtgtcccactatctgtacaatgcttttaactttcaagacagtttatgagtggaatatttttttttaatcttaaaagcctttccccacctaggaaatgatgtcaattgaaaagatatgtgtaaagcttcactttataaacaggaaacacacttacctatgtaattgcctcattttgcagttgaagacactgaaaatcagaaatagtataatttgtttaagttcacttaaattgttacaaatcttgaaccagatcctagattttgagataccttatttaagcctagctaagtaagacccacgcctttaatcccagtgcttgggaggcagaggcaggcggatttctgagtttgaggccagcctggtctacaaagtgagtttcaggacagccagggctacacagagaaaccctgtctcgaaacaaacagcctagttatgtcatttttagggtagcagtcaactcttaatttctaattattttaattagactatccttttaagcttaaggtcttgaatgatttggctagaggtattctgactatcataatttgtattttattctactaatttttagtgattaagaagctaaatttttggcttacaaaattggttatccttggagaacttttatcccttgttatgtatatcaggtcttcatttgggccatgttagaacatagttgataaactaattcttttgtcagtctaaattgttccaataggaaaggtaaagccttaaatgtaggagatctagaaaatattggaattttttttctttctctgtgtggaaattgttttccggaatggaagcgatacattctagtttgccaggagtagagtctgagacaatgtaggtcattcactactactttgtgtacttttttactgagtaacactttaaaagtttctctgttaaacattgccttgtcttcataaccctgtgtgcagtctgctttggggttgtttacaactcccaagttgtgccagggaccactgggaaccccgttgggagtagtgagggtatttgctgtgcagtctgtatggccaggtttggctgagactattttgggactcttgagtctgtctgtgtcctccatcatcatcatgctggaactgctagtgtgggttaagcccacactggaaagtttatgtgggctgtgggtgaggtcctggggtatttttctttttaaggctcaggacttttgaggtacatccaatagaatcctccaaactactcagatggaaaacattatatggagacaaaagtagggctaagatggaattttgttgagctgggttctttgcagcatttaagcagaattttcaaactcattttaggacctgggagctgagctctgctctgctcttctcttctcttctcttctcttctcttctcttctcttctcttctcttcctctttctttctttttaagaatttaaaaattcagattgctatataaatttttatgttgtgagatttcttggtgagctaaataagatttgaagatacactgaaactatttgatctatgaactgtcttagaaaactgaaataggacctttttcctatgtgcagtgtttcagctgttaatgctcgtatttataaataggtcatctttgtttgagaaaacacacaaggttttctaactccaaatcatttcagtcagtgaattgctacattaagcagaactgtcaaagataaaactggaaccaaatgatggtgactggccagaggttaactctttcctgctcatttgtctagcatccatggctttctttacttctggttgttgcttttaaaaattgctgcaataaaacataaataaagctgtcttataaaccaggcgaccacgtaccccagtttgcccagagcaggtgctgaatggtgcctgttagcttgacatgattactgttaggttttttatttatccatttggatcgtgaattatctggtcacctcatgtaatcatattgtcataggagttttagttgttgaaatgttatttgaaataaagccatagataatgactgtacccctattttgtctatatctggatgcttctctttgaccaaacatttttatattaaaagagtcctgagtgtctcagtgtgttatattgaacaaaaaagcacattatatgaagtttagaatcatttatttgctgtctgatttttgggaggttatgtaatcttgctgattttttttccccctaggaattctttactagtttgctcaacaaagataataataaataataatgcctcccctattattggtactttgtgaaaatttaaaaaggagagagcctattcctgcacattgtcctctgacacccaccaagtagcacatgtgtgcacgcacgtgcgcgcacacacacacacacacacacacacacacacacagaacaaataataaatatataaaaacacttttctatagcacagaggaactggctgtttagtggagcctttacagggtttatctgtagccctggctgtcctggaactcactctgtagaccaggctggcctcgaactcagaaatccgcctgcctctgcctcccgagtgctgggatcaaaggcgtgcgccaccacacccggctgcctttacttctttttaaaactgttttactgtgaggagagcagggaactaatagagaagtcaggaatacactctggaatgaagattttgggagctagggattgaaatttcaacaagttagaatgttgaaaagagtttcccaataggaagattaaaaaagcagataatgctggtcagagatgaaatattctagaatgtgcaacaaagataagaattagtatacaaatgtaagggttatatagctaaaggccacacattacccctgttagtttatattttttatgccaacagtatatatgctgtaaaatcatagagcctgcatttaacattttttctcattgctggagactgaacctcttttatcacatatgctacaccattgggctacattcccttgtagctgaatgttgacagtatagttacttgcacaaacagcactcagccttagatacaggacagtttttgagaagttctctttcagctccttttcaattaatcctgttcccctcaccacccaggcagctgctttcgttcttctattaacagtaactaatttgcctattttgtaacttcgtataaagagtcttgtacactaagggctactcgagttttgtttatcatgacaattttgaggttcatccgttttggtgtgtcagtagcttatcctttccgttcccgagtactgtcccatcatttgtaggtagctacagtgttactgtgctgctctttgtgtactttacaatttttggctatgatgaacaaaactcccatgaacatcctgtttttctcctgtcttcctttttgtcctgcacagtttgacagtgttctaccacctttctctattccttagttgaggacactgttctgtctttgtgtaaatgtggcagtgtataagtcagggctctctagggaataaaaccgatgattgaaaattcaagaggatttactgtgacaggcttgctttcaggttgtggtctgtgtggatagtccaacaatagcatccaagcctatggaaagccagccctagagtctgctaattcagtatacaaggctgggagtctcagctgctctttggtctctgttggactcttgaagtaggcacaaataccagggaaggaatcctcaggagtacgatgggtgaacttgccggggaaagtgagggcaaacaggcaaagagtccttctttcatgtccttttaggaggactggcacctgaaggtgtggttcaggtttatagccaatcaagaaaatctttataggtgtgctcagatactaaggttttaggtgactccagatatagttgacaaccaagtccaccctcttgtcaacttgacaaacaaccacatctcattatataatgcttcattttcaaatgaaaacaatagcctggttatatttctacctagcatgatataacagttctacaaacaactgaaaatgcattatatattttagaactggtggcaatattctttgaggaataccataaatgtgataaccactaatatctcaattgatgttacattacattataaagaaataaaatataaatattgcgtaacgtgtgtctacatacatatgcaggtacattcttaggatggacatattcatgtcacttacattccatggttctgcagctggtcacatgaccttagttggtatttataacttcattcctttactaaccattctgtattttctccaccctctgaaagcactcagcaggtcttggttcttttcctggaggagtgacccataccttcattcctgaagggtctgtgtgctttgtcatcctgcctagacagacactgtagtgccaagtgacatacaccctaaaggatctcctgctgtccactccttatctcattgtggagcagcaatcctgttttccctttgtaatctggatcagtcgccccctcctgacactgtttttccttttttttgccttttggcttaagggcatcagaagcccaaagtggccagaagtctgagcttccagttacatggaatgttttgtgtgtgtgtgtgtgtgtgtgtgtgtgtgtgtttagtgagaatcaattcccattctggaaccaaaatttctaggccgccagaatttaaggttgctagtgagccattaggggccctagtaaatggaatcgttcacttcttaccccttgataactggccctgtgagtcctggctgtgcgaggaaaccatactgtatactggacattgattcaaagtatatactgccttatggagaatcctgcaccatccttccagggtgctgttacccaattgcactgtaactgtgtcatcagccattccaccgttctgtctggtcagatgcttcaggatggacggaacatggccaaaccaatggattccatgagtacgggtgcattgtcacacttctctggctaaaatgtgagttcctaggtcagaagcaatgtgtgaaataccacgactgtggggaaggcattctgtaagtccatggatggtaggtaggctttggagaagcattagatgaaagaaaagcaaatccatagagagagtaaatatctatctcaataaggactaagtgtgtccttttcatgaaggaagtggtccaagtggctggtcaccctgggaaagtgtgtgaagtaggggcctcagatctgccactcagcagctgacttcctcggtttttttcttttgtatcataaaaaactttgatatactgtattcattcaaataactgtacaatttatactgatttttctgctcattatatcagttcgttcgttcgttcattccttccttcctccctccctccccccctctctctctttctctcttttcttgctgtattggggattgaactttgagccatgtgcatggtagtagacaagtgctttatcactgaactatatcccagtcttttttattttgagataaagtgtcactaagtttcccatgttggccacgaactcactctgtagcccatacaagccttgaacttgctattctactgctttagtttcctaggtgagattatgggcctgtgttgccacatctgacatgacatggcacccccctcccccctatttttcttatgatataaggaatcaaaccttgggccctccaggactatctctcactgagttgtgtctccagtgtcaactcctatgtatggtttctgagacagagtctcagacagagtaatctctactgacctaataaagctttctatgtagactagttttaaacttggagttatcttcctgtctctgccttttaagtcttaatatttgagaactttctagttaattttttattttctgttatttttcaacaaactttaaagaatttaatttctgttaaagttttatcttttctgtatttatgttttgcttgcatgtatgtctgtagacagagtgtgtgcttgaggccagaaaagggtgtcagatccctttgaagtggaattacagatggttgtcagctgctatttgggtgctgggaatcgaacttaggtcctctggaattatgtactcctaacttctgacccatctcacagccccctcattattttcagtctccctctctctgtccccacccttctgtctctctcatcgtctcatttgtttgagacagtgcatgtgtgaaacagggcccctcactgaacctgcagcttgttttgactagactggtccccaagccctaggaccctcatgtctccgactcccagtgtagggaggaatccagaggtgggccacaacacccagcttgtatgtggtttccctcctctgcttacagcctatgtactagtgtgtgtctgtctgtctgtaaacacgtgtgccatggttagaatgtggcaattggttctgtcctctaaccatagggattctggatttgaacttaggtcatcaggcttagaagcgagggccttaaccagctgagccatccatcttgccagcccttttggttctgagaactcgggtcctcctgcttgtgtagcatggaagcacttcacctacgagttcctctccccagctcagtcaataatattttgagtggaaacctcatgctccagttgttgaatttagcattttgtaaacaccaattatgtccatttgtttgaattaattttaaagatatgagtcatatagtataaactaattttaaagcagacagatcagtttatacttagagtccaacagctatcactgcagaatagttttgaaacatttttatcagtttaaaaatgaaacattatagctgttagcggtcactcattttctacctattgtatagtaccaaccatcctttggaaactgtaaaatctacttttttgcctctgaattattatttttaaaaaatttttgtttttgtcttgttttcaggacagagcttctttgtgtagcactgactgtcctggtactagctctgtagaccagggtggcctcgaactcggagatcaccctgcctctgtctcctgaagcctgggattaaatgtgtgtgctgccacagcctgacacctctgtgaatttttattctgttgtgtcatgagcacaatcatgtaatttttaaaaaagatttatttattattatacataagtacactgtagctgtcttcagacacaccagaagagggcagggcgccagatctcatcacagttggttgtgagccaccatgtggttgctgggatttgaacttcagaagagcagtcagtgcttttagctgctgagccatctctccagcccccgagtaaaatgtttttaaagttcatccatgtcatatcagcttatcagtatctcatttcttctcatggttgaatacgttttgatgtgtaggttattttgttaagccagctctatgggttattttcagtctggctgttgtgaatagtagtactgtgagcacccatgtgtaagttttgtgttgccatatgtttgtttctcttagggaaggatgcagcttcataggataattttatgttattttgtgaacaaaaattcctggatagaagctgacaacaaaggctgactgactcattagaactttaatgatgtggaaatgatggaatgttgccaagccaaattatcttgggctatctttaacacacttaataaccatttattaccttcctctccgtgtgacctaatatctttgtgaccgttaggtaaatcttttggaatgtacagacagacccctgcagataacatctgaagtccatagtttgatttcccagcttttctaatatttctaccaatgtattcagaaagggtcttgatttatgattttcttgtgttactataaaactttattaaactgttacattattggaacatggcatttggtaaactatttctgggtataatcactcacatttggcttcagaacaaaccatgttttttgttcctttgaggtaaaagcccccatttttctgtctccttccttctctgtctcttcttccttctttagaaacttcatccctgtttaccaatgtggctgcatcattttacatttccaacaatgtctgaggatccagtttttcacattcctgttatacttgctactgtttcccagtctgcttagagatactgtgcctgtcgaggcacatcctaaacacgcagccagagcttacagcagtaaagctgtcgtttgtgcttgtgcggtcttctgcccaggcagatatgggtgcttcgggccttcccttgtcttccttaagcttggccactgcaattttaggaacattctggaggttccctctgtggatgttttttccttacactttcccttttatgtttttggttaacttgtttgttccaactgcttcaagcagctggaatgttaaacagttgcagctggttgtatttgagatgctctttgggaaactctgagcacagggcaagctcaggatcagctcaaacacgggaaggcttgagcttctgaaggacctgtcagttagctgaaatgattgcagttctccgaaatagagctttgatagtgtaccagcacatttctcacctctcaggggctgcctggcatctggcttcagtctgtgagggttgtttcttctcagaatcactatgaaactggggagaggcagagagggatctctattcctgtgataaaactgtaaaagcaactcggagaggatagggtttatttctgtgtacagcccagatcccagtccattgtcaaaggaaggcagcacaagaacacaggcagggcaggccgctggggaacccaagcatggctctgaagcgatgctgcttagtggccctctcctcctgccttgtttagtttgctttcatatacaacctagatctgcctgcttgctcagggtgcactccaacccccctggcctttcacatcaatcattaatcaagaaaatggcctaccaaattgcctgcaggtgttttctcaattgagtttcttcttcctagataattctaactagtgtcaggttgatacaaatctactaagaccttaagtaaaaccactaggaagctagctgccctacctgcattcagccactctcccatagctggttatgtattttcttctcctttggagctcttataattgtaaaaggatgagtcagttttgcagtctgaaaattattattcatttataagctgggtggggtggcccatgcctggacatgaatcacagagcagcctagactacacaacaagaccctgtctcaagcagacaaatgtggcaaacatgtcaatatttcagtgttaggtataaaaaagatactgagacaaacggtcacttatgtagttgctttgtcagtcaggccagaccctgtcaggaaattgctcgaatggccccattcattcgtgaggaaatagtgcaatgctttagacacacgtcacttttcttctgtctagcatcttcaaccttctactcctttggtaatttctttttgcgctaaacatgtatgtttcggggctggagagatgatggtgcaaaggttaagagcccttactgatccccagatgagcagttccttgacccaagctctgtgactccagctccgggagatctggagcccttgtctggctttggagggcacttgaacatatgtggccgtgcacacaccctctctcactgtaaataagaagaaaacgaaatgttaaagaaatatgtatgttcagattccaacttcttgggaccaacttttaccttcctcatacaccaggtgttttagaattactcaggccatctaggtgattgagcccgcccttctgtgggagggtttcctgaccatcttccaccatcgcatctagtgagatgagcttccatatgttcttctacatttggatgaaacagtttgatacataaaaccacaaactctgctatttattccccagaagagtctgttgtcaaagacagtctggaaggggactgactggtctggccacccagtctcaaaacctgtaaaaatagccagacttaaaatggaaggcaggaaagaggagatttattcagtgtggctacttggaaagaggggcagagattcgggcccctgccctcaatctgtcttcaggatcctggagagagattaaagtttaaatagccggccaggaatgtacacatctgtggtaacaatcaaggtgtctgctcttccgctctcaccctggaaggtggtctgacaagctggtggagctgtgtgaaatctttcctggagacaaatcctttctttatctagctccttcccttctcccagcatgagattcctggagaaattcccatttctttggagttcattgtttcaatagtgtgagtcagattgagagacattagtgtccctttagaatacctttatctctgccagtcttgtgcagctgaagaaggcctatcactccttatccccctgcctctgtctctcaagagtagcagtaggcttataggtgtgggtagtcgtttatccatttctaaaaataactatcattgctaggcatggtggtatacacctttaatcccagcactccagaggtagaggcagagaacatctctgtgtttgagcccagtctggtttacatagtgagttctaggtcagccagagctacagagaaaccctgtcttaatcttctcctatctacagtctctctctctctcccccaaaagtgatttttttgatttgtggcctttgttccattactataaaaacgtccggacattcgcttccatgttggaacatggaacttggtggagcctaaatccatgttcccgatatgctctctccaatttggctccagaataaacttttgaagaaccagtctacctcaattttaggcttaaaaatgatcttatagtaaagccaaactaggttcatttctgtttatgattgaatctctgtttctcgagaactgtgttatgtcccaccctgtagccttaactacaaaatgttctgaactgcctgttccaggaattgcaatcctgcctttattttattttatttttatttatttattttaagatttatttattttttatatgtaagtacactgtagttgtcttcggacacaccagaagagggcgtcagatcttgttatggatggttgtgagccaccatgtggttgctgggtttgaactctgggacctttggaagagcagtcagtgctcttaactgctgagccatctcaccagcccccatgcctttattttaaaaagttgtttacacatcttgcttttgaaacttaactttgtttcatagggttatgtggccaccaatgactaccttgttatgttcaccttgcaaccaagtctttgcttcaggaagaactaacttatgttctgctcctgtaactctgcctattttgcccaccaaacccctaataaaaccccctaaccctgagctgtataaaaaccttgtcttcctcacatccaatgctgctctcttgcaccccaccttagggggaggcagctcatgtacacaaataaaaaagtgtgctgtaattaatttggccatgacaattcgagtcagtggtctttctcatcctatctgattaacaccatctcttctcctccttgagctgagacttggtttttatgaaaatggcatctccctacatactttgcttttgttggtgattacattagttatttttctgttgctcatctaaaacatcatggccacaaacaacttatgggacaaagagtttattctggcttacaactccagagggagcgtacatactgttggggaggcatggctgcaggctgccagagcaggaagctgagaaatcacatcagggattctcaattcagcaattccctctagggaactgaagtagggtaaggctataaatccgcactgcctgccccagtggtggacttcttcctcaagctgctgcctcttgaagattgcataacttcctcaaacagcactattgattagaaaccacagcttcaaatactggagcctaggtgggacatttcaaaccaccacagtttttctccaccatgtctacctggccccatccctgcctcctgttgaccaccgtctctatccaggacattttcatgtctcaagagtcctgttctcttcatttccccttacactgccctttcaacctctttcctcttttatggtccctcttttagttttatgacttatgccactacaatacatacacatataaaaatgaaattctacagtctctatgagaggggaaaacatgcagtattttctttttgaatctcagttactttgcataatatagtttccagctatattcatcttcctgtaaatgttatgatatacatagtaaaactttaaatttttttatttattttatatgtatcgatgttttgcttgcatgtatatctgtgcaccacatttatgagttactcatggttgtgagccgccatgtggagctgggagttgaaccctggtgcactggcagaagagttgtaactgctaagctatctctcctatgcaatggaattttatctttttaaatgttttatggcttttaagaaattgcaaaagaaaagagtgacccagaacatgagtcactcggttgttgccaatgatgcattttgcataaccatgctgttttgcaaatccaggaaatcaatgttagtagagtactccaaatttgactataggatttttaccaccttttgtctttgctttttttcttttacatttagctggtagtgataacataaagttttctcatgtccaggtttgtctgtccccacagttggtactatactcagttcactacaaagaatcattactgtgctgtccttttttgtccatgctgtcccctaaactcaaccttggcatttaccattcttttttgtaactagaatagcgtttttattccttaagatgttatttggattaatgtttgtcttggggtttctgtcactgtgataaaatactacaaccacaaataacttggggaggaaagggtttatttcgtcttacatgtcctgatcacagtccctcattgaaggaacttggtgtaggaactaatgagatgctatggaggggtacagcttactgacttgctcctcgtggcttgctcaggtgctttcttatagcacccagggctaccagccctggtggcactgcccacagtgagctgggcactcccacacaatcagtcacttagaccattttagatacgcgtccttcccaaatgattccagcttctatcaacttgacataaaaagcattggtaatttaatattatgtcaagaataacaagatcatttccctctcttattatgtttcaggtttatttcatttgtcttaagaatctctttttctatgtgtatgatgttttgcctgtatggataatatgtccaccatatgcattcagtgcctgtggccagttgaagatgttggaccccagggactggagctatctgtggttgtgatccactgtgtgtgtgctgggaaccaaacccagggcctttgtatgagcaacctgtgctcttagccactgccagcccagtaacatctttgtgttatctctaaaatactgtctgatgtgcaactggcaaatcaaaggtttaatcaaactagcatgttaggcttatgttcaagtaaagatatatttattttcatatttgcattttctaactaaccctctctttttctttttcttttttagtgaaaatgtgctatttggaatggggaatcctcttcttgacatctctgctgtagtagacaaagatttccttgataagtaagtattaaacgcttcatatatacaacatcaaacatctctgaagtgaagtgattaaactgtgggattgtgctggtaggattgctcagtgggtaagggcactccccacccaggctgacaaccgaagcttgatctctgagagctccatggtagaaggagaaaagtaattcttgcaaattatcctctgacttccacacacacgtgtatgacatgtacatatgcacatactcatacacatacaataaatgggtacctaatgcaaaaaaaccttatcaataacaaaacatctgataataaaatctctgaaaataaaatctctgaaaataaaaccatatatcaccctcagttggagggaaaatcaagcaattgaaatttttttagttgcctgttatttattgagtaattaattaccacagtatctttttgaaaatatattttgtttattcctaatatttttttcagttaaaatttattatataataggtatgggattacatgcctgtaatccaggccctcagaagacagggtcaggaggatcattgcaagtttgaggcaagccttctacaaaataggtttgaggccccctgagttacatgagaaaatgtctggaaacagacaaacaagaagaagcaacacaaaacaaaaatagtgctcagataactgcatttccataggcaagacagtgatgcggagttcttactttataccgtataaacaaattaactcaaaatggagcaaagccctgactcaagaactcaaactgtaaaaaccttagaaaaaccaggtgtaaattgttgtctaggttttacgattattaaattcaatattagtaaaagcacaagcaataagagaaaagaagatgggccttatcaaaaatatgaaactttcttctacactgtgtagagattgaggtctagggatgtagctgtatagtagggtgcctgcttagcatgtgtaagtttctgggttcagtaccagcacacataaatgaggatacacaacgcatgtgtgtgagtgcgtgcacgcgcgcacatacacacacgcacaaaatcaagccaaccgtcaggatggaaacaagtcacgtaatgatttgacatctagtatttagaacagtggttctcacccttcctatgctgggaccctttaatacagttcttcatgttacgaggaccctcatttatacgtttgccactgttatgaattataatgtaaatatctgatatgcaggataattgttatgtagcactgaaggggttgagatctataggttgagaactgctgattttgaagctttaagaagtttttacgtaaattcattgtttttaatagctgagtagtactccattgtgtaaatgtaccacattttctgtatccattcctctgttgagggacatctgggttctttccagattctggctattataaataaggctgctgtgaacatagtggagcatgtgtctttattacatgttggagcatcttctgagtatatgcccaggagtggtattgctgggtcctcaggtagtactatgtccaattttctgaggaaccgccaaactgatttccatcatcctgagtaaggtaacgcaatcacaaaagaacacacatgatatgcactctctgataagtggatattagcccagaagatcaaaatacccaagatacaattcacaaaacacatgaaggaagaccaaagtgtggatacttcaatccttcttagaaggggggacaaaatacccatggaaggagttacagagacaaagtgtggagcagagactgaaggaatgaccatctagagactgccccatctggggatccatcccttatacaaccaccaaacccagacactattgtggatgccaacaagtgcttgctgacaggagcctgatatagctgtctcctgagaggctttgccagtgcctgacaaatacagaagtggatgctgtcagccagcctttggacagagtacagggtccccaattgaggagctagagaaaggatccaaagagctgaaggggtttgcagccccataggaggaacaacaatatgaactaaccagtaccctcagagctccctgggactaaaccaccaaccaaagaaaacacatagagggactcatggctccagctgcatatgcagcagaggatggccttgtgggtcatcaatgggaggagagtcccttggtccgtgaaggctctatgcaccagtataggagaatgcaagagccaggaagtgagagtgggtgggttggggagcagggggaggggagtttcagaggggaaaccagaaaaggggataacatttgaaaagtaaataaagaaaatatttaataaaaaaaagtttttatagctaaaaagcaaaactagggtcagggagatggctcctcaggtaaatacatttgtcacgaagtcaccaagcttgactttgtgcgttcagtccctgccctttacatgatcaaaggagaaagctcactcttccatgccgtcttctgatctctatctgtctctccacttgtctctgtgcctgtctttgtctctgtctctatctggcttatccccgatggaggcactttctcagtagatgcttcctcttcccacacaatggtagtttgtataaagctgacaaaaactagccagcagattgctctgttccttttcatccaagtattagtagaatactaattagtaggttagagaaatatgtgtatttgcttcagaacttgttcattttaattattgtattaaattgtattgattgacttttaaaaagacaagcttaatgattttcttcttgattaggttttcaatttttcaggtgtcaaaaactatttagtgtgtatgtatatgtggacggccgaggttcacagtgggcgtctttctctttgctctctacttactctgctcagtctcacagaatccggcacttccattttaggtagctgggtcagctaacaagtccctagagtccacctctctcacctccctgtgctgttcctattgatgtgcacttctgtgcttgtcttttatgggggtgctggggatctgaatttaggttcgcagagcaagtgtctaaccactgtgctatcttcccagcccccaacacctcagctcttgaactggaaagttgctagtttgcctagaattgacatgttttcagaatacaacaaacattgttgtagttaaaaaatataattaaaaaaataagtggagtagttatctgcttgcattaaagtttttgaaatatcctcattatttattattacaaaggtagtttttctctgaaataagaacaaaataaggattcttaactgaaagtaagaacagagttaagttaatcagctttgatatatccaatttgtcaaaatatcagagctgaagattaataggcttttttccgacttaaaaaaaaaaaaagcaggctcctggaaagatttctgtgccatacagcagagacagcgtgctcatgtggagagccgtgcaatgtgtgcacaccatcagatgagccttggtctcatggagggtgaaggagggcaggtattaatgggtgggagggaaggatcatgtaaggtatccatagtagataaaagtcacaacagaggaaggagggaactaacggaatggccattgggaaaaagcaacataattagaagtaaaaataccttgttagttagactagttgaagaattgtgtatgttctcatagatgtaagtcattttgtctgggaagttggtgggtagaaaaagcatgcatgaaatatgctgtttagtgtttatttaaagttgattgcaaagttcactacaaaatcaatataattaatttataaatgaatcatttgtataaataaaaaatattataaatgggtatatagtaggtttgagggtgaaaaaaatttgaatgtcaagtgagaattttagttttaagactgctaatctaaggtctcacacactagacaaatgcttaaccattaagttctatctccagtcaggtagtggaggcacatacctttaatcccagcactagggagacagaggcaggtggatatctgtgagttcaaggagggacagtttggtctacatagatagttccaggacagctagggctgctcaaagaagctctgttttgaaaaaacaaacaaacaaacaaacaaacaaacccaaccaacaacaacaaaacaacaaaaagaggctgtttgtctgtctgtctcttctgctaagtcttggtatacatgcttagctagtctaaaggttggttggccttgagcttttgagactctaacttctgtagggtttagatttttttattgttactatgtcactctccttgggttagttaattattttcttttccaaggccagtcttatctctgccccaggcagaactggaaattgctctatagcccaggctcacctcaaactcttgccatcttcctacgtcagcctcccgagtgccggggttacaaacataccactgtgcttgatttgttcagggctttgggtcaaactgaggtgattgtccctgctatcaaccacaccacaccccagatggcagcttaggtgctgttacaaaattgtgtgctttccctcatggatgcacactttctgtgggatttattctactggtacttacggtactcataaaggacaactctgaaatcctaaaagagaaaagttggtttttttttttttttcaacacggcctctctgaggctggcctcaaactcatagagacctatttgtctgcctttgcctcctaagggcgtatccagtgatcaaagctctcagtctaaaattcctgaagtctaaaaattccccagaggacagtcctaaaagattaaaatctcagtttttattctggagagacagaatgtccaaagtgtgattctcacggggaggttggtttgggttctgacaagctgtgtgagcagcagaagtattttttcagccttttgtagacttttcaatccgggcaggtggaacaaacttgaaatctctccagaaaaatcttcatttgatgtgatgtatacagtgtttccagagatagggtgtgaatctgtgagtggactggatgggaagatctgtctgtcattgtgacccatcaccccagatcagcccgagcttgcggataacaaagaaagactactggtctcttagacagtggaacttctttatctccatagtcacagcaatctattcttgcagtaaatcctctctcatatatctgtatatgaacatgcatatatgccctgttggctcaatttttctggaaacccattactggtacacattaggtttcagagaagcaaatataattccttactgtgttacttaagactatattggagatgcttattgttatcttgtgaaaaagctgtgataatgtaataggcatacgcctgtaattacagcccctccatgaggctgagtgaatccttaaagcagagtaacaaactgttaccacggcagaaggaccatgagttacagtatgcaaggtcccctctcaaatgcagaaaaacgtctgtgataggttatgaaagttatgaagctgcttaatgtggtagggaggaaaaagcttgttattacttgaaaagtaaaatctcaactgtaatggcaagccgaacgctagctaccctttcaaatggatgaggtacttacaaaatttggagagcatagctacccctcaagtacaagtactgagatttaaagatcacaagtgaaaatgtgaaaaatacaagaagatttggtggggtatgtttctaatttcagtaggtcaggaatactaaaagtcataatttaaggccagcctcgtctacattgggacaaactagaacaagccagccaaacaaacacccctcccttcccaaataacacccaatacatctctccttacaaattacttactcatgtcctacatctatctgtgccttaactcatagtgtggtacaaacattcttcacaaaataagaattgaacaaggctggagaggtggctcagaggttaagagcactgactgctcttgcagaggtcctgagttcaattcccagcaaccacatggtggctcacaaccatctgtaattggatttgatgccctcttcttgtgtgtctgaagacagctacagtgtactcacatacataaatctttaaaaaaaaattgaacaacaagagctgcattctgaagaacttgtgaaagatacttgctaatacagagatgtctccagggttacaaatcattaaatggtaaaattattagacattggagtattagagatgatagccttagttttgcaggagtgagtgttgaaccaagagccttcacatgccaggcaagtgctcttctgctgagacaacacacacaaaaggctctggaggcagaggcatctctgagttcaaggccactctggcctacagagcaagttccaagacagtcagggctacataacaacaccctgcctcaaaaaaaagaagcaaaggcattttatttatttgttatttacttactgtgtgtgtgcctctgtgcttgcttgtgtgcatgtcatagagtgcacatggagatcagaggacaacttgcggagtaggttctctttctacctgtacgtctttgggattgaactcaggtcatctggcttgttggcaagtgacctgatcacagagccatgtgctgccctctccgtatagactcttatattccttctgcttctgtcagaaaaactaggtgtttcactttgtctagtcattgtcaacctcaaaactagtctctgctgtttgttttaaaaaacgtggacattcttgctccaggtggatctgaaaattgtagacagtatttgtatgtttatgtgttcatgactttcaggaaaagtcagagcacttggtgaattttcattggaagatttagtacacttagtggaagcttgaaatggactctagtatgagaaaagagtccattttcaataaaagggaaaatacagggaaaaaagagaaagtgcctttcagttggttctttccctccccactggacagctcatctctgtttttctccgcctcctaatgagctgctttccttccttggcatttccttctggtttagctttacgagtggcaggcggtgttttcgtccctgtgctgtccacccactccctcaggaagtgcctctctgtggtgcgcacaatgcacgggtggatctgagacatgtcttgctgatggcctggagcacattctcttgtagggaatgtaggaatatggatttggtccattatccagagatggagagaaggctgagcaggaccaggcaggcgctggctcagtgtggctacagaactgttgtccactagtgtaaattgttagcattatttttcttaaatgcagcgttcagtgcattcatcttcatatcgtttccagcactgggattaagttacaaaggaactttagagatttgtagtttgttatttgctccagaagtgtcatgttacagcattcaccttacatctaagcatgtgcaggtgtgtaaaaccactggccgtcctcagggaagggggagagagatggcttgtttgtacgacatagcatttttccagatctcagttctttgggttgttgtacatgaagtagtaacacataaagatgatgttgtggttgagactaggactcattaaattgtccaggctggctttaattagtgatcctcctgcctcagctttcagagtgctgagattacaggtatgtgccaccatgcctagctcatggattgtgtgtgtgtgagagagagggggggtgggagagagagagagagagagagagagagagagagagagagagagagagagagagagaaaggggttggggtggggaatggatggagaaggagaaagctgtatcaggtgttgattctttctgtttgccatgtgggctcctattcacaggcttggtgacaagtgactgaacctgctgagccatcttgagtctactctaccctcctatcccatggagattttgataaatgccatcagagtctcagattgtctttcatagtactagtacttcaactcactaaagtcacaatagcctagtctatacaattattaaccttaccgataggtgcttttgacctccttacttatgaatgtgggttattgctcactgctgtgactttactgttgttgtggggatacttgggatgcttttgctgcagagacacccatgccgctattggtattttatttataaattgccctgtgaagagctctgtcatagttttgtttctcagatctaccttcaaaaatttaaataaatgtcttctaaaaatgctcaccaaaagtagttatggaaggaggctaaggaaggagaaatactgagcttattagcaggagatagtcatgcaaacccaagggatatatgagtttatgacaagagcttgttatttataccagacgcactagaaacatagtgaaataagccttaacagagttcattttacttgacagtagaataccactggtgaccccagctaggtagatcacagtggagtggtgggaagagaagccagaacaaaccattgatagaaaagcaatgggaagtgtaacgggccagtttgtagatgtggccaagagcccagcagtgacacattctgaaagatcctgaagaatagaacactacaggctttatatattcaggcttaaaatctagttgaactctgttctttcagattctctaattttatttcatatctgctttgctgacgagaagctaaaacactacttcataaatcctgtaacttttggctgatgttttcatcttagctgtgtgattcactcttgctctgtttctttataagcctcctgaatgttggctgagcagctgtctgcaaattgttataatggttaatacttttgcccttcctccgtttctagtcagtcaatcaacctctctctctttctctctctctctctctctctctctttctctctctctctctctttctctctctctctctctctctctctcttttgttttatgtaaactacagacagaatacattatcagacagtctcctaggaagcatcgtgaattgtcaagttgtagaagaaagataaaatcaggcaagatgaggatggagaaagttttcagatcagctagaaaactggtaggcgtcaggccagagaagggaacacagcagagagactgctgcaaagctttggctaacctctgccaagagcacattcccttggtgtttcccactcagtggtgaggaccagggcgactcagcaggctgagcctcacttagcagtttgatcaaaacaggcgactttctgcctgctgcttgtccagtgtgggtcctttcttccggtcccctttggttcttttcaagttcttactttgacggcttagaagataatgttgtttatgaggaaagtcatgaggcgagatgagaaggggccacgacagtagaggaacagataaaaactgctttttttcctcatcatataaagaggaaacagtatttcctttcatgccactgccaatgttatacatcatataacttcatcttccttttttgcttgctgaattgtgaggcctaagagacaagaaagtttctctcttagcacagaaggaaagaggcactgactaaaaaccttttgtatgatgtgtcttgtactttgtgaatgtcccacacagctacttcagacttttagatgtttatagtccataaacatgaattgataaacagatgctctcacacacattaatattttgatctttgtaactgaataaaactaatgaatcactttttttgtgaatcctaattatggtgaatctatataacaatctacaaaaatccagaagcgccagcctcttttccttgttaaagctttgtgttccttttgcttttaaatcctgtgtacttttatccttgtgtagttcattctgcatattaacatatttcatgaatattgatcaccctatgtttctgcagtaaaaatctatatgtaaatctaattctgaagcttctctatcattagattctgttccacacacagtaaagcacacaaatgcattagattgtgaataattaaataaaagaaatatggtgatcagaaacacagcttttacatgagatgaggaaactgtttctaaagcttttgttcaactggcttactcttgtggataaataatattcattgcttcactgaggtagtgttctgctttgctgtgtgtatatgcggtaccaggggttgagtatctggccaagtgtccaagcctaacttttctcctcaaacttacaaaagacagcatcttgctaactttgcacacgtagacctgcttctgcctccttactgctaagattacaagtgttcacaagactttacgtctttcccagtacagttaattgtgctacctgaccagcgtgtccccattgcttgttggattgagagagaattttcagcagtgccagttatttgaacactgtcatcaacagttgcatgtcagcagattatttgattaagctcttgggtagtactgaaagcaaaactgagaagccaccaggctagctgactacagatatcagagacaggaaattctgggagatatactttgaaaagctacttaaggctcttgcttcccacctcccctaacctccagtgctgggcatcaaacctagggcttcgtgcagttaggtgggctcacttctagtcatctgggtcatgagagaattgagtgagatgtcccaacctgaatgtggtgggaagcatcctatggtttgaggacctgtaccacataaaaaggagggagttgtctgagcataagcatgtgtcaccctgtgtcctgtctgtggatgcaatgttactagcagcctcacactcctgtgccatgctatcctcaacacgatgaacttcctcacatcatgggccaaagtaaacccttccttaagttgttctggacaggtatttttgccatagcaatgaggaaagtatcacatgtgagaagggcttattaagtagtgagattactacactcattgtgggtctttttctcagaggcatcgtgtttacctgagtatttaacaaagtgttggggaacagtcgacacttaatttcagcatgactgtgtcaaacggtttttctcgatacatttttataagcagctatgaataaatatttattccagaatactcattttaatgacattgtctggtttcttccctacctggcaaagttggtggtgctttgtcgattaagtcagagacgtgtaacagtgttgtaagtgctcatttgaaagaactcagcaggctgtgcacttcaatttgattggagaacctataatcaaatgtctaattaaggcaagtatgtttgcatgtttatctgaccagtgtgttcttaatgtgttgcaggtattctctgaaaccaaatgaccagatcttggctgaagacaagcacaaggaactgtaagttaattagccttttcttcttcttcttctttttcttcttcttcttcttcttcttctttttttttttttttttttggtgtttcgagacagggtttctctgtgtagccctggctgtcctggaactcattctgtagaccaggctagcctccaactcagaaatccgcctgcctctgtctcccgagtgctgggattaaaggcgtgcgccaccatgcccagcttagccttttcttgtacacacttcactcttcgaagcagatgttgttcaagtcacttgaagtaaaaattgtatatatcatttttatacatatcatatatatataaatcatatgcatcttatttatatataattaatatatatgtaacactatggctgtaatcatagtgggattaggataatttgcactatatagtttgtgctatatcaagtaaaccccaggggtaattgtctgtgatacccactgaaacatgtcccattgtatttgattttccagattaagatgtatgtttggaaacacatcatttcatttttttttttttttttttgcccctctggtataaacatgagattcatgattaaatttgtagtttattcaggtgctttttctagcacttgctaaaggtgaagaaacatggtttcctgtcttatatagctttatacaaaagcaaatacctacctattgtttagtataaaataaaatacttcaaacatgaagcttgaaatatgaatgcttttgaattttttaatgtacttcttttagagttctatctttttacttttgtgaaatacttacagaatgctggaacatctttgacatttttcttgtggaaggtagtaattaaacgattgccatctgacaaggactgtcagtgttttagttacaaatgataggcttgggaagtttgaaacttgtattttaggatcatctaaagagggaaactttaaaatttttatatgcttctatttttttatgtactttgcctattaattaggtttctatcacctttataagtacactgattttccaaagttccttcaaaagtttcttagcgtactagatatactaattttattagtgtacatattttatttaattatgtagagaaaagttgttactttgtagttcaagctggcaaagtataactatgtgcctaggcagagttagagctcaaagtaatggtctggttgcaagtgctgggatgatggcttacagaagagacccacacaccctggagccatgggatgatgggttacagaagagacccacatatcctggagctatggggtgatgggttacagaagagacccacacaccctggagccattttattttcatatctaactcagatctgtcttgatttacttaacctagactttatttgcacatgcaagtacatgcacactatgtactgcctgctatgttacagtttaatcatttgctattttagtttgttttaatgtttatttaaaagtctattagctgtagaagatacagttcacctccttgtatagagtttgactaatgatttatttttttgtaatttattatggaaaaatgtttctaacaatcttacctgacacataaaaatataactatggaaaaattaaacatactacacattcacccacacactcaccatcgggactttatcatttatattttactgtacttatttatcactttcaggttttgtctccaatccattcattaatttgtttatttatttatttttggattcgtttcaaagtaagtttcagatgtcagaatactttcccccaaattactagggtttagtagttaagagggttttgttgttgttgctgttttaatgtgcttatgctagaattttgagtaaaggaaatcatatgtgtgatttagtttttaaaataagctctcctatttctcccccctcttcttcctcctcctcctcttttctcccctgtccccctattttggcatagacttttaccatgtagccctggctggcttggaacttcctttgcataccatactggtcttgaacccacagagctctgcttctgcctctggagtgctggcatgatagccacgtgctactgtgctggctattccgtttggtttgacatggatcattactggggcatgtaccatttaattccttttttattgctgattagtttggccttttttgttttgttttgcttttgaggcagggtttcttcgtgtaatagccttgggtgactaggaactagcactagctttgtagaccaggctggccccaaactgacagatccgcctgcctctaccaagttctgggatgaaaggtatgcaccaccgtgcccagccttagtctggcgtgtctatctgagtagtctatctgttctgtattggtgagtattggcagttggctgacttacttttactgttttttgtcatgtagggttttgttttgttttgtttttttttacctctacactaatgaaaaatctgaattaagtttgaatagaatcttaaattaaaaactcatcaacagctcttcatgaaatgtttacaaataatgtcatttgtgtctttgacatttaaatatctacaattctcacagagaaagtaaaaatgctattcaccttggtttgattggtacacattgtatgcatggattgagttgttatatcttactatgccctataaatacgaacaaatattttatatctactaaaaagaatgacccaaatctctttgtgctcaagaccaaggatttaaaaattttgaaatatagatataaaacaacattttgactgagaagacagcttagtgagtacagagcttgccaagcgagcaagagcacctgactgtgaatccggaacacgtggaacacaaggtcagtgcctgcctggagcccagagctttggcagtgagatggaagatagagagatagcagagttccccgaggcctgcgggacaggacgtggtgtaccacaaaagagaccttgctcaatacaagatggacagcacctgagcttgacctctgacctccacaagtgctgtggtactcgtgcacttgcactcagacacacgtaaagtacttacagacacacacacaccaatacatatacaccaaacactcagacacatgtaaagtacttaccgacacacacatacacctatacatatacactaaaacaaaaaaaatccctaaaatgtaattatctaattaataaggcatgcattctcataaaacactattattgatttcttacattcaaaataaccttgacatatcatgatattataaaaaaaactgaatactatcattagctaacttacatacaacttacctgattcagtgcatacaagagcttctaatatactgatggttggtattgctttatgtgaaatgattatgtttttattaaaaaccatcttagtctctagactctgaatcctattccataagcagtcatcatgcttcttgggcattctccccagccacaccctggaaaacccgcttgccatacagggaaaaattcggtcagcagtgacatttgtttttctgagcaggattttgcttgtttctatacacggaatactctgctctagggaatggtttcaagttagtcaagtggaacaattacagttgtgatgtgattagtccagaactgtggggctcctgcttggctctgtgaataatcccgtaatgaaaccggttattagttttctatggatttgtttttaccccattacaatcatagttttataaatggaatagcttaaaataagaaaaatgcccctttgattcagtgtttttttccccttgtggtagttactgtgtttgaacattaacacgtctgtgaaaacgtggcctgggagcccatttaaagggtttattttggactcagagacttcagtcagtctggggtggctggcttcatcactgtgagactgtggcaaaacagtgtggtggcagggtgctgttctgggagaccaacaagcacaaacagagagatttaaagggagagaggtgagagagagggaaggagagaggcagctatgaggtaattccttttaagaacacaccaccaccagggaggcctcccatcttcctactttgtgtcacctctcaataacacggttaaattcttaatccattagcaggatagtccacagattaagacagagctcccatgatcccttccttatccagaaatgtcccttgtgaacattgcattatggacaaagcctttaacaaaagccaggggccgaggacctgcattttatatccaagtcatatcttcatactaggtactgctcaaagattctgtatagttttgtatacttatcatatctcaataaaggaatcaaaaaagtgaaagatactaactttatttgtaaatagagacttaagaatagtttgatttcttatatttgagcatacctgcaatggtaaaagatagaaccacttttatatacatattcatttataaacatataaattttacattgcttggaatgtgaatagtgttgagatgtgatcaggaaaattcatgaaagaaaagttaataattgctaaagttattaacaaaaacttattcataccactttatagagatagcctaaactggatagttgattttcctcccactttgctatactccacaaagcagggggagaaaaatcaatctctcttcaaggggcttaggtttatttgtttgactttgaaagacagatgctaaggcaaagcccagtacctattttgtcacacatcgggtgggagacacaggagtaaagggacctgtcacaggtaaaccagcattcatcacagtgctgggccagaggctgctcttctgcttccctcttaagctccccacccccttcttctttttggctccaccaaaatgctcctaaagcatacagtaattttattgtatttatttatttttaaagatgattttactttgtatttataaatgttttgctagcatgttcaccacacgtgtgcatggttccggtggaggctagatgttgggttcgatggccctgcagttacagatggttgtgagctgccacgtgggtactgggaacaaaaccccaatcctctgcaagagcagcaagtgttcttatccacagtcaactctccatgcacagtcattttaaaagaaggttagtgttcggtttagtgactgagaacaacacacacagtatcttgccgcctaaattaatatcacaggaccaatttgtgattttagaaatcaccttagacctacaaccaaatgggttgccgaaaactgattaggtattgtgtatatctgacttttttcaatttgaagatatttaaaattcttccaaggtgaggcaaaaattcaaaggtttatgtcagattaatacagaaagcttttgtgcttaggaaatgtcagacttatagtttaattgagttatattctgaattttgtgtgttatatggtatattaagcctattgtgtatttttcatttccttgagagttttaatcagaatcctcatcactgaagtccttgcttgccttgggtctcctttcccgagaacatgtccaacttcttccatcttacttctttgatttgatgcatgttacttccattgggaaattcaagctaaggttccagtctctttcatgtaggaaacatttatttatacactgtgtttgtttccagtggagggaaccaatcctagcctcagggatacaggcgagcactctaaatactgaactacatcccagcagggcccagaatcattacttttcaaactgtttttctatgtagtcttaatctttacaaagtaacttttctatgttgtttgaattagtctttgaaaagctccttagggtgtacactagtactctatgcagaatacagaaaatgcatacaaagtcttctattttatctcaagtagaaggaacatgtgttagtaccagtagcataaaattattcttttatttgaacaaaattggtacttatttcatgtgtgttgctgttttgcctgcatgtatgtctgtataccacatatgtgcctagtgcttgtagaggccagaagagtgtatcagaccccctggaagctggtgaactggttgtgaagtgggtgttgggaactgaacccagatctattgggaagcagccggtgctctaaactgctgaaccatttctgcagccccatgtaattaactgtgtatgagaaataactttgatttttcttcaagtagcatgctatctagaataagaaatgaagtgcgtcccttcttgcagggagaattgcggccattaccattgtcatcatcaatattattactgaactgatgatcatacagtctttttttacacaaaaattatcatttatcacaaaacaacaaactaagcttctgataaaattcaaaatatctgtgtgataggcatcttaccccaactctccattgtgatcagtgggtactggctccatattaaagcgtgaagtacaccttctgcatctcctagggacctttgggtatactgcggcttggatgtattatttttgagactgaagctaggttatgtggacttgttctccaaaaaaatgaagagatgatgtcttccagagggccatctttttaagtaattgagacaaaactgaacaaaaccactactagttgtaagtgtagttagtgagtttgtagtttgtgtcttcttggaagtggagtgctaccacaagcatactgtctgtgctattttgagttggttgatcactgagatggaccgtcagaagatactctgagctcatatcatggactggaaacccataacttccagcagactgtgattggaagtttgctttatcatcgctttattctttgcttctggctccctctgtggaactccgttaagactgcagcatgactttctagtaatttaacaaagccgtcaaggttttatgtagaagagatcaggaccttcttttgaagttttcttttatatccaatcactctgggtgacattttgaccatgggaccccagttctttttttaaaaaatgttagtatgtgtgaaaacattcctcatagcaaagttcccccaataatgtatgaatttgtattattcttgaaattgctttgtgttagtgagaaatttaaggtatcgcctgagtgaatgaaatgcgtgttgcacttaggcctacctaaatgtgctcccttatactttcttagcagagtgcaaaagacttgatttttctccaacatttgaatcaaattcgtttttaagtgctcctaattttagcaagtatttcatgttggtagttaagtttatatagttactgtaactgctcttttggtttgagcttttaaaagacagttttaggtttctctaatcaggtatttttgtttttttgtttttttttttttttaaatatgttgctctggactttgagtatagcttagtgattgagtgcttgctcgctctctctctctctctctctctccccctctctttctctctctgtgtgtgtgtgtagcaaaagagagcattaaccttttagatacttattttatcaaaagtcatgagatttgctcaactcctgtcagagaacttcctcctgcattaaatgggagttaacacggagatccacaactagatagtaacagaggaggagagacttttgcaacactcagtggtaaatgagaggtcttcaccaaactccttccatcaaggatcaggcatctctgctgaagaggaggcagaaaggcagtgagaacacacacagcagtactgatgtgcatacaaactgaagagaccgtgcaacatacacaaggcctacacagatggggtcctggcaatgaggggtgtggacagaggctctcacccataaccaagaagctgtttacacttgatacaaaggggaaagcagctctcctatggagtgtcactgggtgtgtcaactgcattacacagcaggccctatgcccaggagtgtttagccaacacaaaataaactctgtagtatttttgtagacttttgttttattttggtactttttttttttttttgtcctattattcttttgctttttatttttctgtttttgtgttgggaggtcgaggtggggaggaggatctgggagagattgggggaggggaaccatcatgaaaatatactgtgaaaacatatctttcaggtttaaaaagtcttgagttatatagtactcttacgaagcttttgcttgcaagtgcctcacagtcttcggtgtggatggtttggagtttctcatccctggtgttctgttataggctgggacccttcatggtgacgaatggctagtgcagctctagaggtaattatagttgagaatttagtgacaataagagagtgtttcttttaaaaaactactcagacaaactttctaatgtgattgtcctctgtatcacatgttctttctgagtcagttgcagagcaaacaaatgggttggggatttgcctcagtgggtagagtacttgtgtagtgtgtttgaggccctacgcctggttctcagaactttataaatcagggcgtggtgcatgttgggttgcagatgggtcaccgcatgcacttgacccttgggcgggttgtgtacatctactcatgtcctcaagtttcagcaccatgtgcattatcccccgagccttctccctggcctgcatatatttaatggtgtaaaaactattaattaagttatgcatcaggcactgtttaatgcctaatttaaaccttcccattttcattattataatgaaaatattcctcacatttctgcctattttcagataaaaacagtgttaagtaccatacttttaattttactaacgactctcctgaggtatgacaatcataattaacaagaacgtttctgccttggtgccagggatcccatccggtgcctcccacatgcgagggaagcacctccccacccctacctacctcactgtgccctctgcctttgccattttacctaacgctagtcattgctcaatatgtgtgctgtgaaaacatctgaacccgggggttgctcttttggtgaaggaactttgatctttattttctgatcacgagctttcagtttgaatacaggttggcaaaacacttgtgaaatagaatacctagtggtatatagctttatgttcctgtctgtggcgaccactttgaagtggtgttttctccttccatagaagcctcccaggcatggcttctcaagggcactgtgagtcattcctgccttgagagcaattgtaaacctctcctgctttgctctctcatcatctctaaggaaatgtgtcagttgtctaactagtttcattattgatatttggcctgttagggtgtcttagtgattccaattcctttagggtttgtaatttcttttttcttctttttcttttctttctttctttctttcctttttttttttttttttttagttttaagattcttaagctggtgatagtggcacaccccattgatccctgcactcaggaagcagagaggcaggtggatctgtgagttcaaggccagcttgatctacaaatgaattcgaggatggctagagctacacagtggagcttgtgtcttcaaaacaaagtaaacagaaagattcagagatgttcctgaaaattttgtgttttgagatagggtctcacagtgtgcccctggctgacctggaacccacaaacgtgtgcctccacagtctgataaaggcacgctgccccacagccagcccagaaggtttcttgacctccctgatctggtttctggccagattttacattagaagagctaggttgtcctgtaattttgtttccttccatctcatctcaggagccagccaaaggtaaagttccctctgtctttgtacctttacgcgctcagtatacttttgtttttaggctttcttacttatgtttggtgattgggtctcagggtatgtccctggcaggactggaacttggtaaataggcccgattctccttaaactcaaccaccctccctgagctgaggttaaaggtgttcactagcatacctgactcagtatgctttttagtgaataaaatgtcttgaatatccagaatgtctccaactctgactctactcgttctttattccttgatgattccctcctgaggtgttaacagtaggacccaaggttgcctgcctccagtcctgccccttctgtcattctgcttattaagtaaccttccgttcactttgtcctgtcccctcctaatggtccacctctatgaaaggtgaattcatcccacagttgactataatgttaacagacttgaagagatgggtgtggctcagcatgcctagttcacttgtgagaccaaggcaggaggtgatatgttagaatagtggctcgagttggaacatagcacaccaggccaaaacagttccacgtgtaagaggggcaaggtggcagcagaaaagagaaggggggaagagagagagagagagagagagagagagagagagagagagagagagagagagagagagagagagagagagatggggtatggctttctttatatatatgggtaatgatgtaacacaagtaaaggtaggaggtgagctaagtggattctggggatatggtggctgttgccttggtaatgggtctgcaggtcccacctatgtgatgtcacaggtttcagaggtcctgatgccaacaggaggactgtcttgagtttgatgtcagccaaagacagacaaacaccaccaaacaaaattgctttagtggttctgtaattgtccagtgtcaagcatggcttgtaagttgttgctaactgggaccttgccttctccttcagtgatagcctctggagtcagctttcttctgtcaccccccacccttttcagaaaaatttagccacttctacctccccaattcagccctaatgaatttgttcctactatactgtaatttttctgagagtctctaatattagactgagtttcttaatgactaattacatcccattatgctggctactctacatagttttgtgtactgcattttgttgcttaaattcctaaatgcttatggattatggaataagtattccttgaaatgaaagttaaattaacaaaattatgttctatcatttatgagaattttagaaaaatttttcctaaagcttaaggtattatctaaaggtatatctaaaggtttaatgtgtgtgtatgtgtgtatttctacgatctatctatatagatatgtatagattgtctacatctataggtggatttgtcaggcaattcaatataattctgatgtttttatagtaaagactgtagaaaataatgattttgatgcacaatccaatcctaaaactagagtaattaggagctggggtgctgctcagtggcataacacttgttgggagtgaggttgacggttgaggagaagatacaacatctttacagcataattttattctttacataatcatatacccacatatgtacacatgtgtgtacatgtgcatgtatttatttgtagctctaaggtatattgataagagattaagaaatgaaagtaaagaaactttctgttggtccagtttgacaaagagcaagctcaaattggtattctctgctggcgtcttccctccgaccctgaagaaggactttgttctctgtttattgaacagcacagaaagcacgaggtgggtgggaaagagatgggggagggattgatttatcacagaaacttttaagggagtttcaccagggaagacttcacttcccaggagacctagaacagcacttagaaccacacacgctatcagcctatatctgcatgctgcctgcaacagttatagggtatttgtcatttaaggttgttttcaactttcaaggtggctgctttcagtaggcaattaccgtgacatagttacatacacacattattctgggagtgtggaagagtttgtaactcacgactaaaggataggttgtaaatgttgtttgggaaatctaagacattgcaaggtttgtaacactgcttttggaggttaaacagcaggacagcaggttaagtagtctcaagttctaagtaatctcaaggcattttattaggttaactgcaagtttggggtcaagaaatactttcagaaaaatgtatcaccatactagggagtactgaaccccctgggctgtcacggggtccaggttagttgacactgttggtcttcctgaggagttcttatcccctttgggggcctgaaatccttccccctattcttctataaaagtccccaagctccatctactgtttgctgtgggtatcaacatctttctgagacagctgctgggtggagcctctcagaggacagccatgctagactcctgtctgtgagcataacagagtatcattaatagtgtcagggattggtgcttgcccatgggatggttctcaagcgggttattggctggccattccctcagtctctgctccccctccccccatcctgcatttcttgtagacgggataaattttgggtcaaaaggtttgtgggtgggttgatgtccctgttggtccactgaggttcctgcctgcctacaggaggtagcctcttcaggttctatattctcaatgctgtgagtcacagctaaggtcaccccctattctggaagttgcttttatttatcttttcccttcctgtttctccttatccttctattttgaaaggtactgtataaaatcatggttctttataacatcgcagctatgtttatgatgtatttctttcttactggtatgcggtgcagagaaaaccagagctggacattggttaaaccagtaagactggggctggagcggtgccttagtggttaagagcatttgctcctcttttttttttttttaatttttattaggtattttcttcatttacatttccaatgctatcccaaaagtcccccataccctccctcccccccactcccctacccacccactcccacttcttggccctggcgttcccctgtactgaggcatataaagtccaatgggcctctctttccactgctgtctgactaggccatcttctgatacatatgcagctagaggcacgagctctggggggcggtgggggggtactggttagttcatattgttgttccacctatagggttgcagaccccttcagctccttgggtgctatctctagctcctccattgggggccctgtgatccatccaatagctgactgtgagcatccacttctgtgtttgctaggccctggcatagcctcacaagagacagcatatatcagggtcctttcagcaaaatcttgctagtctatgcaatggtgtcagcatttggaggctgattatgggatggatccccgggctggaaccaaacacccatggaaggagttacagagataaagtttggagctgagacgaaaggatggaccatcatttgcttctcaatttctagaacccgactggtgacttcagaatgtctgtcatttccattccaggggatgctgcaccttcttctggcatcaggcccacatgcttatatgtagacaaaatgtacatatgaaataaaaataaatctttttaaaagaagcaataaaacctggcattattccggggccattgcaacaagagataaataaacttgatgtagagctggcttaggtctgattacaagaaaggacaaatgggctgtagctgaggaacgggcttagaagaagggaattgtgaagagacagcatcagggtagggaagaggcgatgacactggactgatccacaccacactgatctgacggcttcttatggaaggtagcctcaaatgatggctgggagtgaggaaacatatgtgttaatgagggtagagttctcccactgctgggcttttgaggacatagcccaagggttagttcagaaagggctcatcagatattacctagattagagttttctcaaggaataatttgactgagtagctaatattttctaaagcagagccctccctgcagatgattgtggtgcgtgctaagatgtgagaacctaggcacaagaaatagaacattaagatgaaacctgggtaatcccaccatacattccaaagacaaatctgaaaaactgaaacagaattctgtatgttagtcagctttctctacaaaatactgtcgataccctgtgtgtaagactttgcctgctttagcagtgtgacctctttgagactagaacttaagtattgttttgtattttatataacttggaatatttacagaagattagatactggattaaagatagaaactgcattttagactgtggactctgctacttgcacctaaacgatgtgtaattaaattacttaattggtgaaaaattgagtctggtggttactgaggctcaccctgctgggtatgacagtacattgggctagaaggatctaggtctcttttcataggctggcgtgttctttctgccaaaggttgtgcttgatctaaatatagcttatttatcttgttagtgagtctcagcaaggcccgtttggccagaacataaagagactatatgaaagacgtaacaacatcttctctaaaatgcttatttttattcagaactaactgacttttgaaaaaatatagagaataaaatccaattttgcccaccaatcttcaaaaagaaattatgactctcagtagtgtagcgtattgctttataaccttttttgtgggtggcgatgttttctgagcagggtctcactgtatagttctggatgcttgaaacttgctctatggaccaggctagtttcaaatgcaaagagtgctgggattaaaggtgtgtgccaccaggtccggctttaaggacaatagaaatggcatcctatccaggcgtttgagtgggtatttttttttttaacatatgtgccctttccatctgtgtgtgtagatagggtttcctgtgattgattgtgccatggtgtacttggtctccgtctctacctcatttctaacttgctccattgccaccttttaattttgcttaaaacaaactttcctcatgttcttttcttggttctggtccctctgagttcatccatgtctttatatatgcatgtatgtatactgtagtttctggagagtcattcagatcctgtggtaagagaaacggactgatagcgtctcttgtgtatgggcagagggtaccactggaaagcctgtggagagtgctttaattctagtgagtcttccttgctatggccccaggaggcagcatccatgggtttttgttttcttaggtagaattttccagtactataccagcagaggctaagacttggctaccagcgtgccaggggttcagctacttcaggaagaaatgttaatgagctaggattttacttacattttttaaaagtagaagtaagagttccctgtgtcctccccctaccccccccccccaatcttccaatcagtcaggcttgttgctttgtacttgtgtctcctctcagggacgtgggacagataccttttttcttgccctgttagctttggttttaaatttgctctaatgtgcttgttaattatcgtttcttttgctttaaagttttaacttactaatgacattttctttcttttcttttctttttttgcaaaaaatattctcttgaatttattcacattttaatacaaggaggagagatcaagtttattttaatcttttgtgttaaggcaaagtcagtgatcacaatttcaaaaaacgtatacaaactgaggtgtttatttctttcccattaggagaagggaaaaattaaaaagaaaattgcactgactggaaggttctcagtagaaaataagaccactatgatatatgattaaaccaatagttgttggaaatacataattttagataattaaaagtctagctagtgctcggagagatggctcagtgggcatggtgcaagcgtggggccctcgggttatccctaacacctatgtcaaagccaggacgcatgcgtggctaaccccagcactggtgcaagtcgggtggagacaggaggaagtacacactgtgagcacccacatactgcattcacacatttatacaagaaaataaagttaggtcagggagtatggtacactttgttttgggctttgatcctgctttgattacctgtaaaaggtagatataaaatttaccaacttaagtatctgctttttcttttgtttccaattccttcatattcctttctgtaggcggttcatgtctattttagttcatgacctgatttgtgttctggacaataaccagcacactctgagtattcagaaagctttccctgttagtgacgcttgggatcagccttaaaacattcagtcacttatttagtcatactttatatgtaaatataatatgtaatacatatagtggtttataaatatattcagaaatataatgtatataatatataaatatgcatatgaaacttaaacaagtaatcagtgctgctgccttttgtgaaaaggattgctcatatttctttctctttattagattgtataaatttaatttttatagtaaagttggtacttgaaaactattgaagaccacaggctaagttccgaggtgatttttagtcctaatggcagtctaatagtgctatttagcttctcagcagctaaaacagtgccacgatcttgattcaatttccaagagtacttttgcttgctaacttgattacatttcattattcttttgtagtaatattttattatttcctcctgttgcagttttaagaaatatttataaggtcaatgtggaaaattatgttaagacgaaggtgatagccaccagatggcgctgtttcacctctttatgacattgtgattaataagtatataataagcatagaagatctagaatcatttggacatactattttggggacatggatgaattttttaagaaggaagtattcaaatatcataaacttgagttcatttttcatgttaagcagtagtgctgtaattagcctgttagagaatctacttgtttgatactttgtttcggctgtacaaacaaagcttaagctgtgtgtgtgtgtgtttgtgtgtgtgtgtgtgcgcacacacacagagacatacaaggtctcagtgtgtagcccaggttggccttagactctcttctcttcttgtctcctgttctccagtgcttacctcatgtgcgtgctgcccagagacgcttttgttttgaggagctgaaggttaaaccacaggttgccagactctgagctctacccatagtcctgagaaacaactccccccttttctcttttcctaaaagaaattctgatttttttttaaaacgtgtatgtgtgttttgcctgcatatatatttgcaccacatttgagtctggtgtctgtggagactagaaaaatagccctcctttctttattccaagtgtgggccattatgtctgattagaaaattacacttggttgccagtaagttctttagttttataaagttgaaagacaacttttgcacatgttcttatatgtttggaacaaaataactatgtggtgcaataattatgtcgacttaaccagttgaatgaccgttgtagtcacaatacctagttgatgaaattcacttctccttgaacttagatcaccctgtcacaggagatggttttaagatttaaactgtggccgagaggtggtggtaagatttaaactgtggctgagaggtggtggcgcacgcctttaatcctagcacttgggaggcagaggcaggcggatttctgagttccaggacagccagggctacacagagaaaccctgtctcgaaaaaccaaaaaaaaaaaaaaaaaaaaaaaagaaaagaaaagaaaagaaaaggaaaagaaaaagattaacctgtatatggtgggacatgtctgtcagccttgtgcttgggagggtaaagcaggaggatggttcccagggaaaagaggggacgggaaggtgacagagagaatgaaaatgtgtttctaacatctcacattgtgtgtgtgcatgcagaaagcctcagagctccttctgtttccatcttcccttcccccaagctctaggattgcagtcctagacagtcacacctgactgtctacatggctgctgaggattcaaactcagcgttctcccgcttgtgcagtgggcatgcttactcactgaaccgtcttcccagcccctatcaatctatatttgtgcctggccatgagagcgaaacataaatgcagatgccattggaagcacttacagaatcactgttgtatgagatcaggctttcttacctttcagttgaagttagaaaattttcttatagtctttaactttgtctttgaatagcaatgctatgactgaatttttatctctaccaatgaggtgaggtactatggtaatactactgtaatgcttgatttgaacttgttttaatgtattgctgttttttaaagccttttgtcatagttttacagtcctcatagaccatgctgcacattcagtagaggacttacagatatttctcattctagtaacaatacttatgttaagtattatggtaaaaggggaattattaaacttttccctttggttgatgtggtggtctgaatatgcttggtccaggaagtggtactattagtaggtgtggccttgttggagtaggtgcatcactggcagagggctttgagacccccgttctaaccacttgagagccaatcttctagtgtccttcagatgaagatgtagaactctcacctcctcctgcatcatgcccgcctggaggctgccatgctatctcatgatgataatggactgaacttatgaaccaataagccagccccaactgaatgttgtccttgtaagagttgccttggtcaaagtgtctgttcacaatagtaaaatcctaactaagacagttgagagttatgcagtgacatgtagcctatacttttaagtcctctgccttttcgaaatctgttaatattattatctctagtgcttggggtggaagctgggctcgtgtgtgccagctaagcactctacctcagagttgtattccccacttccagaattgcttcatatagataccttagaaggattacgtcactgaaacttttggaatcaaagtaatgctaataaattcatgttctcaggttttaagtattgaccaggctattgattcctgttagaaatgttggtaaatggatgaatgaatcgaggatttgtggctagttggtgtatgtccttcaaaattctcttggtatatgtttggctaaattgttgaaaataaatttttactatgattttaaaaagtaatctggtttgagtcattgcttctattttatttttttgtaggacagtaaagctgagaatttttctgttttctcgttttaattattgttttaattatcctggaagaaagttagtttttgtttctgttattactggcttttgtttgtttttgcattgattttttttgtttgttttgggcttttttgttgttgttgttgttgttgttgttttgagacagagtttctctgtatagccctggctgccctgtaactcactctgtagaccaggctggcctggaatttgcagagatccacttatctctgcctcccaaatgatgattaaaggcatgttccaccatgacctagctgctattggtggctatttgaagagataaagacttttagaggaaccctgcctgaccagtggcatgggttccttctggtctgggccggagccctgatcagaccttggacccgaactttgcagccagtcccacaacacccagaggaagttccactcccaggcactcaaattcacccagaatcataggatcagaggtgagaaggacacaacatctatcccaacaccaccaggagtaactgggccctgcggtatccagggacacaggaactccacctgaccagtggcatgggttccatctggtctgggccagagccctgaatagatcttgggccggaactctgaagccagtcctacaacacccagaggaagctccactcccaggagctctaacacaacacaggattcccaggggcttggtcaccccaggatctcaggatcccagaggcagctttactcccaggagctttgacacaaccaggatcacaggaaggacaggctccagtcagatatcaagggcaggtagcactagtgataaccagatgtctggaggccagcataagaacataagcaacagaaaccaaggttacttggcatcatcagaacccaattctcccaccatagcaagtcctggatacaccatcacaccagaaaagttttggacctaaaatcacttcttctgacggtgatagaggactttaagaaagatataaataacttccttaaagaaatacaggagaacacaagtaaacagctagaaacccttaaagaggaaacacaaaaatcccttaaagaattacaggaaaacacaatcaaacaggcgaaggaaatgaacaaaaccatctaagataagatctaaaaatggaaatagaaacaataaagaaatcacaaagggaggaagccctggagttagaaaacgtaggagagagatcaggagtcataattgcaagcatcaccaacagaatacaagaggtagaagagagaatctcaggtgcagaaggtaccatagaaatcattgacacaacagtgaaagaaaatgcaaaaagcaaaaagctcctaacccaaaacatccaggaaatccaagacacaatgaaaagatcaaatctaaggataataggtatagaagagagtgaagattcccaacttaaagggccagtaaatatcttcaacaaaattatagaagaaaacttccttaacctaaagaaagagataaccaggaacatacaagaagcctatagaactccaagtagactggaccagaaaagaaattcctcctgtcacataataatcaaaacacccaccagtcaaagaatattaaaatcagtaagggaagaaggtcaagtcacatataaaagcagacctatcagaattacaccagacttctcaccagagactatgaaagctagaagatccggacagatgttatacagaccctaagagaacacaaatgccagcccattctnnnnnnnnnnnnnnnnnnnnnnnnnnnnnnnnnnnnnnnnnnnnnnnnnnnnnnnnnnnnnnnnnnnnnnnnnnnnnnnnnnnnnnnnnnnnnnnnnnnnnnnnnnnnnnnnnnnnnnnnnnnnnnnnnnnnnnnnnnnnnnnnnnnnnnnnnnnnnnnnnnnnnnnnnnnnnnnnnnnnnnnnnnnnnnnnnnnnnnnnnnnnnnnnnnnnnnnnnnnnnnnnnnnnnnnnnnnnnnnnnnnnnnnnnnnnnnntcatatgattcttgtattttttgtcccatgtatctggcttattatatttatttcttatatatatgttaaaaaataaaacaatactagtagataattgggagaggaggataaacagaatcacatgtatttagtgctttttaagggtttatttttgttatgtatatgagtgcttctttacttgcatgtatatctgtatgccactcatgtgcctggtgcctgtagaggacatcagctccactggcattggagttatggatagttgtgagccatcatatggtggtgggaaaggaacccaggccctctgtgagagcagcaatcagataagaaccatttccatgtcttctaataaagcaaaccatgccataggcaacatttgtgtgaattattcttcattcttgtttcttttattagaagcgtcctttgccatataataaccaaaacggtgaccttattaaagcatttacatcttaatttgtgggggcaaggtaatgatttggcttttcttactatctttaatgtattttagcatactagcaggaaatgcatggtcttactcttactttactcattttaataaagactgtggagggggtatgcccaaactagacatgcatggcttctaacatcatgagccttaatttcatctgagtatttgtgtgtcagtatgtttgctcatgtatctttcctctcttgttctcttccctattccttgcctcccatcacatcctatgaattttgttgtgccactgtctactcatttgatcatgcaatggtcacaccatttgtaagggaccaatatgaaccataaaggagttattctagtagcctgagaagagggataggcttctgtatgtcagggtcttgcagaagactgagcacgtatagtttgacaaaatacattatatgctacggaatgaggaatgagaaactaaagaaatagcttggggtcttagcgtggcagagttttacacagaagctaaatgagctgtgtttttacaataggtaattgggacctatggaacattttaaagctgcaaacatactcagtctgtattttatgcactcaatcagtaggatacagtgaaacagaattgagggtagaggccaatgaactagtttgaaagatttgcataagtcccataactgtactaatatagtgtgcatcataaggtagaagcagtaggaactccagaccaggattgaaatgcattcaatttagtggggcagtgtacacgtgtaatcctagtgaggcaagaggtctgtcaaaagcttgaggctaacatgggttaaggataattctaggccattttaggcttcaaagtgaaagttgtctctaaaaagaaccaaccattcacacaaaccaactagaaacaccaccacagctaagttcagccatggattgacaggatgtaattactaacgaggcaaggcgaggcaaggttctgacatttctgtagggtggagctgaagcttccaaaggaaaagcagcaggtttcaagggaaaacattgggtttgcagtgttgggtttgcagttacaaagctcatggagtattggaaagatgaagttgtacgtggaagaaaataacctgtggaagaaaagaaagctgggaggcggagttagtccttttttaaaattttcatttgaaaacctaaatgttacagttatcacaaagtttcaatccttagaatttaaatattaatagaggctaatactactactatttacaacttcctacatcggttatgttaaatgccagacatttactttcattatctcacttatttctcatagtagcacgagttaaaacaatactactgcctagagtctcaggagaggatatattgaccaggatcatacaagtaagggatggatagttgaccttcagtccacctaagtttaaaacctaggcttttagccattatgctgtttgcctgtcttgtggaatgaaagagctgtaatggatctaaataccacatctagtcttgctctgtaatcaaatatatgccatagctaaaaatatataattaatgtcaagattagctatctaatttccttaataaaaaccttaaccaaaagaaccgttcattactgtgtccttgtggtagagtctgttttaaagtaagtgtttgtgtgtgtgtgtgtgtgtgtgtgtgtgtgtgtgtgtgaatccttacctcactatcacgtgacttgagtaaattctcattagtctagactaatcataattacccattttcctttctagccatgtttacacatggactcttatctcaccagtaatcgatatatgactgggtaaatagaacccagtgggtgagcacttgctttgcaaacctgaggacctgagagagaattcccagtacccacataagccaaacatggctccatgtccctgtaacccaacattgggcgatgggcggattccgagagttcatggccaagtgaactggcccacactgcaagctttcctgttcagcgagagactgtctcaaggcaataggacaaaatgtagaggaaaaaccctcattttctgtcctggctgaacacactttactctggtctccacatgttccatcaaggtgcatacagcagacaccacatgattctgtttgcttacttgtttacctgcctcacacctaaagccagcacctcagttgtgaggaaccactgataccgtcttcctacagtcagtaataaagaagttgtacagtttacacagtatgtcacattgctagaggttagacgcagtgagatttggtgaaataaatagaaatgaaactgcagatgatataatcatgtatttgaaaacttgacaggatcaaaactactagtaacataagaattcaccaaaaatgcatgtacaatgtaagcatttgtgtatttgaatgcttggaaaccacatttataaagtgagactgagtagataaaatacttagtataagcttaccagtgacatttaaaagctaatagaagaaaaaaaacacataaaaacacacataaaagacaggtttgaacaaaagaatagatgtagttataatctctgatcataatattttaaaagttactatcaaatctccttttattttattacattttatcagggaggttttgtagaattggccattaggctttattgtaaaaagcagtgttctagccgggtgtggtggcgcacgcctttaatcccagcacttgggaggcagaggcaggcggatttctgagttcgaggccagcctggtctacagagtgagttccaagacagccagggctacagagaaaccctgtctcgaactccccccccccccaaaaaaaaaagagaaagcagtgttctaagctgctctttgtttggataacattctaattttgaaatgttaatctgtaaatgtttcttgacttttcaaaatcctaggttttaccatgacatttgcgtaagtgcatatcctttctttttctttcctttccaagagttctcttcctcgttccttcaatagttattttaattaataaatatatgcatttatatatttacctattgagcagtattggggaaggaacctagagccttagacaggctaggtaaatacttaactactgacccacatacccacccctcttttgcttcctgtttgagacagtgtctcactaagttaccaagactaacaaactctctagcttaggcaggtagtaaaacttgcaatcctcttgcctcagttacttttggtgatgatgacgacgatgacaggcttgtgccacagtcccagcgttaatagttttcctttctacttatgtatcacataatataaatacttagaaaaaatttaaaatctatgtataagagacaatgtggtacttgtcttacttcactcgatctatccattttcctgtaaatgacaagacttctttttcatggctgacttacactccactgtgcgtatatactctatattgactttgaacactctggctgataatcatctaggctgattccctgcattgtctttgcgtgagtagcactgcaataaacagtgatgcatagctatctctaggatatgttgacttagattctttttagcatatacccaagattagaataaccaaagttttttttgaggaaccaccataccgattttatcaatgactgtactataatatcattatgcataccagcaatgcataagccctttccttactatgttgatgatagccattctgaagtgggttggaatcccgatgtagttttgatttgtatttccctggtgcctaaggatggtgaacaatctttttttacatggattggctatgtttacttcttttgagaactctgttcaatttgttggactatttccttacctttatgatttggggtttttgatggttaggtttttgaaatcttatctcaaagatcagtcccctatccactgaatgccatggcatttcattactagtaccagatcatctggaacattctttccatctgctgagaggactggcagactccacgatggtgattgctccatcatcttgggtcctgagctgaaaagacatagacttgagtcctcggctgccctgttattggaagctgctgagagtttgaggatctgattggctaaatgtgacttgaagcctatgtgactcctccctagtgaggaacagttttaatttgtaaacaaagttaattcatcagagatctctgtgagagcaccaaagattttacaactttgttttttgctattgaatttagagtcagtccaattcaggaaaacattagcctaagaattttcataatttatgtaaactctgaaatgcgttattgcaactcttaaactcattttcaaagacataaaaacaaccatgtcttttgtttgttaatgtaattgcagcaattttgacattaaaattcattacaaaactgtgtaagaatttcagtttagtaatcatgtgaggaatcttagtgatttctttgtattttaatattcagaattccaagttgcccttatgtacattttgaaattgacagaatgctattacttaaaaaaagaaatcagttactaaaccatcttttaatttgacattaatccagcatattttttaaaatttaattcagaaatatttatttttctacagacttttgtatgatagtttgatattataactgataatgaatgcgcaaaatttattacataaatgaataaaaagaccagtatattattaagattactgcttactgacagtaaatttgatttcgtcactaaatgacttctgtttatctaggcaataaaattaaactattaaattcagtgcaacttatactgtaaataaactattagcaacaagcataactgtgagagctgcttatatgaattattcactgcaaacttattatctctgtgtcattagcatgtaagataatgaacctaattaccatggctttaaactcaggggagctggcaatttatgtgtagaactttcggggctgtggctgcatctacaagaattttcagagaaccgcagacaaatcatctgcttctcacttgcttattagttgatttttcacaggattagagttagtagtatgtttctctggcctttgaaataatactaatactaataataataataataataacaataataattgtttgtgtgtgtgtgtccatgtgtgcccgtgtgcacatgcgtgttaggggcacatgtgcacaggtcagaagatgactttgatgagatctttctcctttatttaataatttatttgcagcacagttgcactgaatttaataattctgggactgaccttaatttgagagacttctattttaagtgcctttactgtctgagccatctttcccacaggtgaataccttcttaaaggcgttatgagaaatattaaaagtaaattgttcatgccttttgggcttatttagtgttgtagataaacaaggtattaaggtgtatatataacttctttcacacaaggtagcattacctatatttccataaatagtctaattacttgaaacctccaggctaaaaggttaataatcaattgtctcctctaaaagaatttagactacaatgatttactttcataggacttggtattagcacttagtcctttccaagctttagtcttatgtctctgatcttactgcgaggcggtgatggactccttgtgtctattttctctatgttatagtataaattatctgtaataagctcttctaattcaagttgataagtctacaactgcctcaattatgcactaatcaattatacactaatttaattctacttagcaggatacagtatgtcattaatcggtttcagacttaatacaacagatttagaagtaatcaaaatttgaagcatgctattagcagggaaaaatgaatagttataatgtctagtaattcgcttgttggtccttataaactaagattacttatttaaaaggtgaaaatatattgctgctgtttatcttattgttcagtgccaagggtaaaaatgaagattattcaatctaagcaataataatatattataagctttatggggaaaagagttcacttgactatttatttatttatttatttatttatagcttttttgatacaaggtttctctgtatagactttgctgtcctggaactgactctatagaccatgctggcctcgaactcagaaatctgcctgtttctgcctcccaactgctgggaattctgctccccaccactgcccaactgttttgttttgttttaattaatttattttttattagatattttctttatatacatttcaaatactatcccaaaagttccctataccctccccccgcccccgctctgctcccgtacccacccactcctgcttgttggccctggcattcccctgtactggggcatataaagtttgcaataccaaggggcctctcttgtctttttaaagaagagtgatttcatgattttgcctgtatgagtactttgcctgcatacatgtgtatgtaccatgtgtgtgcctggtgctcactgaagtctgaagagagtgtcagttacattacccagcactagagttaggcatgcttgtgagctgtcatgtgggtgctgggaattgaacctgggtcttcttctgtaagcagctccaagtgacttcagcaactccagctgtcccgccccagcatttgtctctagatttagtcaggtgcatgtgtgcgtatgtgcacatgggggaaggtgacctcttaagagcatcgagctggagtgacagcaggtgtgagctggatcatgtccatgcagccctcttggtgttttaaagagcgagtctttgtgtgtagtacaggctggctttcagttcactgtagctcaggttggcctcaaattcatcatccttctgcttcaccttcggaaggcttgtactcaggcttgtgccaccattcccaaaagtacagaagtgtaggctacatcttatccttgcttccttgtttcttccaacaccaacaccaccaccaccatgaccacctgctcctccttttcttcttcgtgtcattgttctatctcttcttcctctttttgtttttcttcttcttgttcttgtcctcctccttcttcattttcctcttcttctctgttgcttcttctcttctttagttaaatctttaaaaaaattttttttggagtgactggagagatggctcagtattaaagaatatttactgctcttacagaggactgggtttggttcccagcaacaacattccatggctcacaacacctgtaacttcagttccaggagatgccctgtggcctcctgtggtactcaggtggtgcatgtaaactcatgcaggcacatatacattcacataaataaaaatatacagatcttagctgtgtcaggtagtgcatacttttaatcctcacatgcagaggtagacagaaatgagtctcatttggggctgagttgcagactagctagtggtatgtagtgaggctttttttccctctcagtcttttacataagtaaatataagtttgataaatgtttcatacaggcactgttgaccctaaattcacgatgtagggtcatgaacttgaacttgatccttctacttctgtatataccaccatttctagttcagtctatatacatactctactacttgagctatatctgtggccatctcattcccttaaatttcaacattcattttttaaattttcctttcatttccttttctctgctttccattcctttttttttttcctttcctttatgagacagattttccctatgtaatagccatggctatactgggtttgctttatagatcagactggctacaaactcacagagatccacctgcctctgccttctgagtgctgggattaactggccacaccaccacacacagcctcaacattaagttcttccattactacatgattttctattacgtagttgtttatcatgcatactatcacatggatgtatctgaaatcatttttatggcagttatgaaggttttcaatatataatcctttgttataaaaatatttttcttaccataccatgtatggaatattagtagttttgaactgaattcaaagtctagagtttgaatttgaatattacacatttttgaacagctgtacagatttattttatttaagacttgggctgaagaagtggtatttggacataattaatttgatcgtctttagtttattgatcttagttcttttctttttttctccttcttttgtatgtaggggctttaagctatatgagcagcacgttacaaacttgatcagtggttttactattcctctgctcattgaactcagtacttcaacttgaacttcattacttcatattgttagtaattctcttacctagcctctttcctgatacattagtgcctctcagttcacctggtttgatgtttgtgtgagaatattataagggggaacgttttggctttggagactgttaggtttattatacttttttgaggaaatcagtttgggtaagaggtttctgggaaacccatgatccactatatctcagggcatcccttcgaagtgtggtgggaatgtgtgcttgtagttagaaacctaaggacccgtgacgactttcccctggaaggagcaatcctgtccgtagctgtctgcccccacagagcagccactcatgagcaattctgtcctgagtactcacggccgtcttgtctatgaaatgaggtgttacttcttgctattcctgcctttccatggtctgtggttaaatgagcctggctcacaccactctcttatctcccctttcccttatactttccctagctttaatcactatttttgttcctaaattcattactgtttgatttcaagtagtacaaagaaacacatttcatgctttattagttgtgttccttgccttgtgtttctcattttctattaattttagtatcatcaagctctataatgctaagagctctttttacatgaagcattttttgcaattgaataaaacttagttcatagtacaaaaggtttacaatgcattttttcagctatcctgaagtctagaaccttagtaatggtttttttttgcatctcttactcctttgttcgctttaaccagacttcatttgtttatagctaactttaaaactcttctttggtctgtttttgtgaatattttgcttattcattatttttcttatttattcatacttttctttctttccttctttcttttctttaaagatttatttatttattatatgtaggtacactgtagctgttttcagacacaccagaagagggcatctgatctcattacacatggttgtgagccactgtgtggttgctgggatttgaactcaggacctccggaagatctgtcagtgcttttaaccactgagccatctctccagccccttattcatactttttagttagtcccagcatcagaggtagaggtgggaggatctagaaggcagggtcacccttggctcactacagatgtcaaggctagactgggctgctcaagatcctgtttcagcctttctctatattgccttcaccgtagcttcgtatttcacttgggtttggaatttgaggttgaaatagtttcctcagcaatctgaaggctgtcttattttggcaactggtgctgcttgtgagaaatggggtgccatgatttctattcttttgtggagaattatttttgtttgaactcttaaaatctcctctttttgcccactattctgtaatttcttttaaattaattttttttatatgtatgaatatttttcctccgtgtatggctgtgttaccacatgcatgcctagtgagtcacatcccttggaactgcagttacagctggttctgagctgccacctgggtcctgtgagacaaacctgggtcctctggaagcatagccagcgcttgtaacctgcattatctctccagcctaaagcattatgtatttcttaacgtgacattttttttcccaccatgaatttcttttcattgggctgagcatgtaatgacaggtttaaaatgtcctttctgacattttttgttatacagtttttggtaattactttctatcatgttctctagagctatgaattactttatagtttcctggcacttagaggttttctgatttttccagtataaaaaatacatttataatttttaatgtattttttacacaattttgccaccttttcaataacatataactcaatgacctagaatttaaaattttagttgtaagctgtgttgtaaaagttgtattcactacttgttatagatagctatagtaattgtgtgtgtgtgcatacatgtatacacgcacacttgcactgactcatgcttgcccacatatgtacatctggaggccagaaattcatatttttagagctttgtttttattgttttttaattatgtgtacctatgggtatgcccacttgagtgcagtggctttggaggacactggtgtctgacttggagcttgagttacaaactgttcagcctcacttgatgagggtgctcacaactgatgtggcatctttgctagaagagcagcaagcgctcataatgcctggaatatctttctagcccccagaggttgatattgtaaagtttcatttagtgtaggagtgccgagactacagacatctatggcatccagcttttcatggacttccagggatggatctcaggtcaggtcatcagactcctctgtcactcagccacctttctggccctccacattgcatcttcaaacagcctccctcacagaaacagagctcactgttttatgtagattgactggcctgcaagcatgtagaatccaactgcctccttaccgcagcagtaccagacacctgtggtttctgagagctcactagagctcactgatttaggtaaccgacgtctcctgtctccccctcacaggcctggggatctgaattcaggtcgttgtgcttacacagcacccactttaccagctgagccatctcctgatcctctgagcaccagacctttttttaaaagattgatctattttcccttggagtatttttcactgagtatatgtacgtgtactgcctgtgtttagtcccctgcacccaagtcaggcacctcaaaactgtctgtaactcttgcacctgggacttcacgccctcttctgacctccaagagacccatgatgacagacatgcacatagaaaaataaaataaataaatctaaacaaaatttttaatggagaaatcttaaaaatgaaataaagtagccctaacctcacggagcaattgttgataaaggtatgaatgaaggcaccctggaatgctacacataagtagaactgaattagaatcaaatgccttttggaagaattactgaagacaaagcaacaatgggaggagactagcctgtattcttcagcaaaaggaatttgaagatggagttgtagtgtctagtgcaggacactaggtggcaccattagcttacactcctctactgaaggatgctgagtagtttcagtatctcaagtgatttgtcttttattgagtgtatttcaagataatattgtagttcttgggttttttctccttcagtgatgattttgaaaattttcagtgatatttttgttttaaaacagtttgtctcccaaataaactatattataaaagtcacaatcagttcttttgtaatttttaaatgaaagactaaactatatttctatttagactcatttcaagcagattttaaagaggttcagtcatgtagaataaactactatgcagacaaactggcacatgcctgtaatcccagcactaggttatccacatgtcaccttatcccggggtagtgtagaagtccactttttttctaatgccaggtcagtatataatttcattcatccttttgaaatactaagaataatcccctggatctgtcttttattttaagattccagatttggaatgattaaatgttttaatttctgaagttgatttgtaccattaaatttttatggatggtgtagtgtacaagtgacaaaagccacatctcaaagctgttaaacaagtgggcatttagtaaaaagatcctggtatggcatcaggtaaagtgtaactcagtggggtaaatagtattagagtcatttcagctcttttcctcggtgtcggttctgtttgcaagagaggatggctaccgtcagctgatagttcacattcttgtttttctgtattcctcctagtggctccaaattcagtgtggtgattatatcctagtgggcctgctctgactggccttggtcccagacctatccccaaagtcaaagacggagcttgtgtctgaaagttactgatcaaaagtgtttaggtgaactctgtgggcaagtggcatatgattgtaaccctagcactggcttatttgaggcggaggatcaggagtctcatgttcaacctgcctccagtgtaaaaccttttaaataataataaaatagagtgttagagtggtggagtctgccaggcaaagttggatattgttaggaaaaagaagactgtttatggagttggagagatggctcagcagttaagagcaactggctattcttccatagcacctaggtttgattcccagcacccaaatggtggcccatagcaacctgtaactctagttccaggatagctgacacccacttctgaccgtagaggaaagcagggaagcaagtggtacccagacatccatgcaggtaaaataccaaacacattagaggggggtgaggagaatggttggaaaattccattcatttctaagaccttaggactatattcattttgtcagttctccttcactagaattacttatctcagcctcatctctgttacacctagttatgacatctctcaggccatgctctcgtcgacaggattagggctgcaacactgttgatacagttactgtaaagataaaacaatgcagaaagccaggtgacccaggcctagcatttcagatgtttcataagtaaggatacgttaggattttatcagcccttgtaatacatttcagattagtttctgtgtcctgaatatcataaatgtaaatttataatggccaatcttaattggatttaacttactgatgactgtgttcactgcctaagaagacagttgatacatcctggccttttcagggctcactttcatttgtatgctgagatgcataagtttctgcaagggttttgtaattaatctatgttggaaaatataaattatctttaaagactagcaataaatatagtaaaattatgataaatgattttattgtttggggaaataatataaactgttttatgtgtttgaagaatacgagttggcagcaagggagagaaatgagtgattaagtattgcttaaagttgttttttaattaaagtttcattgctctgtacagtattcagaaatgcattttaaatgtaacattaatttttcacttaccattcatctttattataatatattgcttatatttatcataatttttcccaccaactgcaagacttttgtgattcatttaggttaactggtatgtagtattaagagcttccatgatagcttttaaagtgtttcaacattatagatttagtaacacactgtttcaatatctaacaagtcagtgaaaatcttgacagtgatggaaaatgttttctttaaaactgtgttactagaacattgttgtttacctcacgacatagtttaattagttataagctgttatacttttattgttcatttaaaacccagaagtgtcagtagaaaacattatttcactaatttttgccatataccattttctagacataaatagtaccacgtaagaccaaatagtataaacagacatggctgctcatttttagtgtttgttattctgtgtggtatatattctagttgcagtttatttttgattgctttgttaacacaggtaagaaactgtgctatatgaaatactaataaggagatatatcattccctagtaattaaaagtaagaagatgtgttaaatattaaaagtgaaaattgatttcatcagtagggaccatttttaatacaaaaatgttaaacacatgaaaagtagtacacctggttttaaataaggtgttgcttagtgagttatagctattgacccttatatcagaaattaaaaggaggtagtcaatatagtccgtgcacttgaagataggtgtagtaaactcactgttagcataattatatactgtattattgttttaatacgagtgcaaatttctttaatgtctgacagtagagttcagctggattttcatctgcttctgacttcaatctgtgactccttcatttttttgttgaagtgtatgaatgaagtagagcttcagtgagatatgtctcaatgaatcaaagctaaccagagcagatggagtagatggactgagaacaaccagaattcatacatgaagacacacataactatactcttagtctattatcttaaacactgtgaaagaaaacaaaacccccttcagacatagcatacattcccatttaccactggagtgatgtcattacatacatgttatctagcctctgaaaaccttttactatatacctgttaaaaataaaattgggccaggtggtggtgacacaccacccagctctgggggagcagatgcaggcagaactcggagttcaaggtgagtctagttcacagagccagttccaggacggccagggctgcacagagaaatcctgtcttgaaaaaattaattaattatttaattaaataataggctgcagagatggttcatcagttaagagcccttgttctttcagaggacccggcttcaattttcagcacccacattcctgctcacaaccatctataactctaggccctttccaaactctttgagcaccaggcacacatgcgttgcacagatgtaaatgcaggcaaaacactcatatacatgaagtaaaagaaataaaatttaaaaaaaattaaaaattgtaaaaagcaaatcactttaactttggtttcctgaaagagttcttcgggaagctgatgaagtgcagcctgggtctggctgtaacgatgcatgtctgtaaccccaggtttctggagactgaggaggatcatggatacagagcttcctgggccgggtagtaagatcctaaacctaaaagaaagggttggaggggcacacggaaacgagcatgggtctgagtgtttaagggttctatcaacgtggagaacccgaggatcaagcttgttaaggaggagggtagtacttgaggcttaagtccctttaagtaagattatgtccataaagtgggcatgaaacagtgacatagaatataactccccagttaaaggtttctaaaggcacctgtgcagagatctctacaggacagttatttctcaagatcaatttttaagtgtagagaaacaagtattttagaagacaaagcccatggcatgtgtgaggcaggagcagggataacagtacagtcttctgtttggcagtgatgtaccacggacggaacacggacggactgaacctccttaggagtagaggcttctggaaatatgaagagtatttccattcgtgggtcatttatttatcttaatatcaacttgtaggggtttgatacctccaaattggcagttgtttaaggaggcctggaaacagaacagaccccggttagtatttggcaggaaataagtgttggaaattttatttctaacactattgattaagcacttaacccatttatgttttcatgctttgaaattcgaagcatatctattccacatttttatttctatacatttaaagacaggttttgtttttgtgtttttgtttgtttgtttgttttcgagacagtgtagccctgactgtcctgaaactcagtctgtacaccaggctggccttgaacttagaaatccgcctgtctctgcctcccaagtgctgggattaaaggcgtgcgccaccacgcccggctaaattttgtttttggacacataattttttcctagtagagtttatcagaatgacaattatttggtatgagaaagcactcttcgttttcctattagcttgaactttccattgatatgaagcaagtaagtccttgttgtctgaatgaaaaccgactgcatcctaaactctgataggaaaccgtttgcaggggtttaacatgctgagaaaccttaattattctgaatgtacttatgttatgatgtgcagatgatttgtttactgtctttaatgtgactaagtcaaaatataagtagttatttgcataaaggggagatgttgctaataatttttgctttgctgaatgttacatataaagttaattttcctcgtaggagatacgaggctgtttccactcatttctgttgcattataaatgtctcattttatggtctctctagtgctgacattttactgctccttttgaaatagttaaaagtcgtatgtatttcgtttctgttggtttgatgtaagtctccttacgtcactttgctgtttgattatcttgccagttgtcacgcaagcacttgcttattcacatacagtgcggttctcagtttacaaaaaaacctttggtcagttggcttggtgtttggagtatgtgtgcttcagcccagtagttgtctacagtagtagtgggctacagtagtagtgggctacagtgaacctcttgcagggtttttaccatgcttactccctctgcagagagtgctggggtgtctcctctaaacaagcacttggtacactgggaaaaaaaaaatagaagaaaaggtagctgtggatgtggctctgctgcagaaggctcccctcgtatgtgtgagatactgcaaaagactattcccccccatctcacaagaaattcaaagtaggaaaatgctcatgaaataaggtcagaaggaaattaaacattttgtatacagcagtacaatatattttgtgtcttaagttagtacaaagaagaaaattaaatataaaagttgatagtaatctgaatgttattaaaagaataaattgggctggaaaggtggctcatcaggtggtaaggcccttgccacaaagcctcgtgacctgttcagttacagggactcacatgacagaagcagagaaccatattccacaagctgacttctgatctccatccttatgttgcaatatctgcatgcccacacatgagcaaacacacacacacacacacacacacacacacacacacacacctaaagatgaaaataaaggcttttgtaacatagtgggctgtgttaagcagttctaaaacacagtgtgtctgactcagcactcaaaactcacccactgtctctctcacagtaacttccaatgttgcatgctccattggtgaggacagcaccatattttgtctttcgtattgtatttttatggtatcttttctataaatacctccagttgcattgtagctgcctgcagtattcaatagtataatatgttacgcatgattatagtctgggagcagatagccaattcatgcacctagatttgtagcaggctgttccttctgattagataactctagtgttgcacagtgacaaaaatctccttatatgtttttctgaatacatcccatcattaagccgcacatgagtcctctgaacctctaatttttggtcaacatcaaagccaaagcgtcgttaacaggggaacaatcttcagtaccacagcaattaacaccctggcaaaggctctcaaacgagttcagatacatcactgcattggctcttggagacttgagcaaaactgttgcccattttaactgtagagatggcagctgcatggcattcaatggagcaagccatcaaagggttagaaatgaggaccctgcatcacagagaagttgtgtgaaggctttcttgttctgcaggttggatttgatgacataggatctgtatcaatctggtctccatagtgtagctcgaagtgtaaatgctagggggcagcacttgactactctggcaagggagagtatgttagtttcctgttgcagctgtaacaaacccccaggacttaacgctctatcttatgaaccctttataaaaagctctgtcttctcatgaacccacagttccttagttcagaagtgtaatacagtccctcactgagccggtttctgctctaggttgtttttttccctcccaaccccacaccttggcaaaggaaactcagttgcccaagcttgccccaaacttcccatcctcccagctgtgctccacggttcattggctgcagtagtgatgttagaactgtggtcctctcttggcactccagggacggctgcttcgaggcttgttcacgatgatggctgaatttgtttactttgaattaatcttctctttcttatttttgttttaacattctctttttagataacttaatctgaccttcagcccactctattacatatatgcttttccttctctcagactctctcttaaggcatcagcttcctcctccttgtcttctttgtgtgtgtgtatgtgtgtgtgtgtgtgtgagagagagagagagagagtctgtgtgtgtgtgtgtgtgtgagagagagagagagagagagagagagagagtctgtgtgtgtgtctgtttgtctgtctgcctgtctgtctgcctgtctgtctgtctgtgtctatgtgttggtttggagataggatacctgctatgtaaccctggctgacttaaacttgatctcaaactggcaatcctcccaccttggccttttgagcagtgggagtacagcaagaatattcccacatgcctgacttgttttctttgtatcttttttcagcaactcaacaatatgaagtgtaagtactaattaatctctcttagatttccagtacttacagttgtcattctcctcctttcgtttaatggtgctgctaatattctagtgtgatattaagtagtagcatgcacctctgttggctcccatagagtgggagttgtgggtggtgggaactgtactctggccctctggaagagcagcaagcactcctagcccggagccatctccctactcttaactcttggtgctttagaaacatattttcaaaatttgggcatcttggattattttttataaatgtaatcccaaagtaatctatgttatatttttttaacttttgagaattttttaaatacttctttgtattattaatattcaaagtatgtagcctagtaaaatgtctcagcaagtaaagtttcatgcttgcaagcctgagacctgagttgattcttcaggtctcacacagtggaaggagagaattcacctttacatgtaagccatggtacattcgtgcatacaagcatgcatgcatgcagtaattgaatagtagtattttaaaagattcagagagtgagaaagacttaacatttaaaaaacaaatactttattttctcccttaaatttaaaatagacttggttcttgtttcatgggtgcagtacttacctgcatttctctgagaatgctaagtggtttttttttttctttctcttttgttccatggtgtcttatttttctccaattttccattactttttagatttgattttctctttctcagcagttgcattcaaatgtatggtgatcttagcctttttgtttaatagagggacattaaatgacattaattgcatggggtaggccttgtcaactcagtcactgttaaaaagttttgtagtgatgtttctttatgttgatgtttggttgtttctttgatcaccttggatctaggatggtattgttccttgccgtctaagatccaagaaggagaataaaatggaaagttctagtttagcttgccaagtctgtgttagcctttctgctactgaaacatttttctgttgtcagtttatcttttgtagatagaggcactgtagtctgtactgtaggatggacagccaccgtattgcatacaaatgttagaagggagcctcagagtttagctgctttttaaacgttgatggtctgctttcactctctttgtttggtttggttttggctcggtctttctatgcagccttggtcgttctggacctcatccatactgtacctggctttgcctcctgagtgctgggactcaaggcgtgctccaccatgtctggcatttaaccactctgttgttaaagatcccagtgccacccacctatgtgcctcctttgggtgggataacaatgtaagtttgtttgcattctggatttcttctgggcttctctcgtcagacttagagctcaggattcttgattctcatgaattaatcactgctgttctgttttcccctgtccggtgtcgctattactttctttgctgttaagtttaaccttgagagtagttctactgatgatttaggcgcaatcaaaaactatacgagtcgaattctttggtataactgcccatatccaaacagttttaattttttccttgaacatttgcaaattgggcttttatagagtcaggtaatctaattgacataccaagggttgtaaaaagtatgtgtggatgtcatttgtagcaggtaaagaaaatcatagctggtgaatggctgtgtagtgcgtgagggtggcgttgactggctgcccgagcttgtgtgcatcagatagccttgtcctttaggaactgctgtaatggctctttttcttcaggtactaaatctgaacgaatacataccaatcatgaccattttattccctttatatgctattaaataatgactcaccaataaaacttgatgaaattcattgagaacattttgagtgtgtattggggtaaaaaagcacaagaaagtaaaagacatttttttcctgtaatctttggacagggtgtaaagacatacttttaactagtgtaactattctgaaactgttagaccagaggcaccacagaagggagaagcttaggtctgtgaggatagcattgaacatcaaggtagccctggagccccccaccctgcagcgctaactgatgcctcccactgacttaggacaacgatcaaaataattattggtactgttatccaaaagaagccctgaataaataaatgttataaggttcaatttacataactgtaaaaatcaaaaatcaagttttgaaacattagtaactattggttttaataaagcaagctaacttagaaacttatatcatatccttccattatttctgattttgtccataactttgtgaacctgatttcttttgttgttgttgttgtttgataaagttggtcctttttgccttttgttttggtttaatttgttttgacctgacattttaacaaatggaactccttggactgattaaaaacgcattttatttggcgaacgatatgtattcttcacaaagttgcttttctcctttcttcatgacttatgctgttccaaatctcctaaagcacatgtttttgatactggtgtcaacatttttaattaatattttagatgccaaaggtggcagtgtgaaagattgttttgttagtgagtgatccttagaagtaagtggcatttggttttattttacaatagaatttaatcttatatgttttttgttaaagtaatgttacccaaaaaatctcttattgaactatttgtggtgagctttttaaggatgtttaagatttcacatgcagtttaactgatcacagatgaagttgtaaattaatacctcatgagcatgtttgactgcagggcattgcttgtgaatcagacctgctttgtttctataaactgtgaaaggggcttaagcataaggattaaaattgtaccatgataccagagtacttatggaaagacactgtagttggatcatttagaatgtactaaaatcttatgaatagccgtaaaatgtaataattcccttaagcttttaagagttataagagttagtttttattcctttgttgaatttaaccaccttaataaagaagttgtcttgctgctttagagctaggcctggtattaagaagatctgacatagcagggtgatcggaacaggtgagactccccaggaaatgtgcatggaccttcacgtaaatgttacatctccattttattccattcattctttttacagaacctttatgataaaaattgttcattgctatcttctagtatagtattactaagtgactttttgggtataaaatcagatattcgttggcgccattttttatttacagtgtctgaaaatcatctagtggatatctgttcttttgtccatgacagactgttaattatttattgggaaaaaaataccagagagaagttatcgggtctgtttcagggtctgaagcttgagtcagttagcctgcttagcggggcgagcgagcagtagcccaggttactgtaagatgtgcaggagctttggactccttgtgttctcggaacactttggtacctgttctaaaaatactatggacaaaggcaatgatgaaaatgatttttaagttactgggtggtaggcgattgtgtcaatcacaaataaattgtattaatgatgatgtgtagaacatagtgtaagacatttaagaattcaatattcttcacatgcatccgtatgtaaaccgcttcctagattgtctcctttttccctctctctctctctctctctctctctctctctctctctttctttctttctttctttctttcttagtgtgttctttaaacaatttggccaattgtggccattgtaactatttctattgacagggcttcactgaatgcccctggcactttccagttccaaggaggaaccaaaatgcggatgataggtcttgccctggttgttgactaacagtttctcatcttcctgtttctattttcttagtgtcaaaagaaagtcataatattgctggcctcagcagggtctcaagaaaggaattattcattctggtagtgatggctaagttaacttgccttacagtaagagcatgggtcagtgtagatagtggcaagtcagctgcaggcctcagatctcccactgaattactggaggcaaagtgatttgccagaattatacatctaatagctaccaacatagccacatgaagtagctgctatgattctttttttttttatcttttctttttatttatttatttatttttagatattttctttatatacatttcaaatgctgctgctatgattcttgtaagcttctcagatgagaaacaagaggcgctgcatttgttcacagtcacttgtctgggtatcaaagaggtgaggtttcagtgtaggtcaccctttatcctaaacctcagtgtaagtactgctggagttgtacatgggagtgtgtggatacagtcattcaaaatagatctaggtgagaagagacaagctaggggtcaaggaaatctacatttaaaggttaggccagaagaacaagaaataaagaaacgagaaataggagaaccaggtgggcactatgtcttattaactaagttatgtatgtaaatgacaaatgaattactgactcagtggaaaacaaaactataaaagtaaattcatgtgttatatgaatctattttttataaaatttaaataaaaacagtttgcatttaaaatttatctgatttagaaatacattatgtcagacattgatattttctggatgactgcctcccctcctattttttttttctttcttagattttattttttaatttaaacattagtgtgtgtgtctctttgtgtggttatgtgtccagtgtgtcctagagccagaagagtgtttcaatcttctggagctaggctcgggaggggatgagctgcctatgtcttctccaaaagaagcaggcacagtgtacccatggtggggcataaagaattctcatttggagatggggaagatgaagtacatgatgtcataatatacctgaaaatccatgtcttcctgtaaccatctggaaaatcacctcgttctttcttagcataatattttgcatgcgtttaggattcatagacccaagagacgggaagtgtaactagagtaatcttgactacaaatggaattcagtgatgtttccaaactggactcatgtaagaacaggagcttggctgggccttaatggtcctaaacccaaggactcaggtggccagaagttgtttctcagcttccccatgtcggttgcaaattaacatcattcctcagttcctgccatgctcaggtgtcacctgctgtaatgccctgctcaggtgtcacctgctggaatgccctgctcaggtgtcacctgctgtaatgggctcatgctagcttgctttcttctcacttgaaacactatcagtacttccgatagtcagtgttagatgctacatttatattcaagataggcatctagaaaaaaataacccttttataagactaagtatttccctattcttctgaagggtaacttcaagtgacgcacctataactgggtttcacttgtgtaatggccaaaaccttttcaagtttacactttggatggctttgtaaatttggcatttttttgacaaggttacgtatggcattagcaatttgcctaaagaatgaaaagaaaacgccaactgttttgtttgtttttatgacttgtgaagattttgcattttagttttctgagttcttttcctaaaggcccgggtgtttggttttttcttgttgttgctgatcacctcaggagcttcctgggtttggggagagtgacccttcacgatctcttttagactaaagagatcgagttttctaatgttgtgtggaaggttatatttagctgttggtatttcaagttggaacacttcattcggctgtacctttagtcaatgagtcatctggagaaaatgggctgctcttgcttttaggaagagtctgtagcaaataataataataagttaagctctgtgggagattttatgccaaataacaagcttaaaatggaaaatgttttgtaacattttattgcccatatgcaaaatatatactaaaggatatagaagcatttggctcattattgtcttcagctgattaaaaaaaaaaagtagccctgatgtcaggcattttctacaaagcattgtgtggactgtttttttagttgtagacaagtcgaaagccagcataagctctatggaattattttatttatacagtaaacagcagtggctaaagcttcatggtagttgtccatattgtggttattgaaatgttttcaaataacatttgttaaaaaaatgcctatatcacttcatttttattttaggagctttctattagtcaagattctttaaggtgtagggagcaagggatgtgggagatgtggggtctaattttatatacctttgtatcgcatatgtcacactgattgcatatttcatctttcccatctggaacaaagcaacatatgtaatactggagatttagaaatcttaaggtcctgcaatcccaatttttaaatctgaactaccttttctgcttttatattcttagctcagtgagcaggttggatttttagagttctaagttagataatgagattcagataaagatgactgagatcggcaaatactaataaaaggaatattatttacaatgttattaaattgactacagttttgtaaaaccagtgtcaacctaagaggtcagcgagatttctcagcagagagaggcaggtgaaggtgatttctaagcaaacccgatgaccaggtttaatccctagaacccatgaaatcgtacaaggagaaaaacatctccacaaagttttcatctggcctcaatgtgtaggctaggaatgaacaccacacatcatttacaaacaccaagaatcaactgaaaaataattaaaaacaaatatattagtggttgatgatcatagagttaataacccaaatattttaatacttttctctataccaagccataatttaaggactaaccacagtataaacgaaatataaacatatattgatactatagtagatttatttcagaatgaaagaattgttctaattaggttatctgctaatataacttgtttggttggtttggtttggttttttgagatagggtttctctgtgtagccttggctgtcttggaactagctctgtagaccaggctggcctcgaaccctgctctgtctgcctgttcccaagtgctgggactaaaagagtgggccacaacttgacttctgctgatataatttattgtgctttctttacatgtctcctaagggtgtctgtttgctcaggaagtccagattaggtgagcctgtgggcttctctgctgctttcaacagcagagcttatccagtgaaacctaactttttaaaagctgttattccaatgtggactcctgtcatttctaggacagcatatggagcatacttgtagataatggttaatttcataaagtagttattgatgcttttggttaagttcctctttattttatagtttatccttttctgttggtcctagactgtgccctgtattaacagacttctggggaatttttacgattgttttcataggcgctagaaaagcactcggcacaatttaatatgcactattcttgttaactttttatgaactacatacaacgcgtagaagagtatacaaatcacacgtgtgcagctgaatggattacctcagagtaaacatacctgtttcacagccatccagccctggaaatagaacttggcaagcagaccaaaagcacctggtccccttcttttccccaatgatgtcttctctcttttaacactggagcttacttacttagttttgctgttttagcggtttaataactaggaccatgaagtgcatatttttggatctctggcttctttgacttgtcactgtgacaatggctgctcacggcatgcagagagccatgctgtcttcattttcttttggtccatgttccttgaatccatctcagttcttcttcagttttcctgatgcatatccaggttgtttctagtttggctgtattggcaataatgttgatatctgagccttcgtctatgccccacgtgcacttatctcccttggagttgtaggattgcatacactggctcaatcttacattttaaagatacttacaattttagttttccaaaatgttaaattcccaggagctttccactcgttccactgttttcagacaatgacctttcactttgctcttctgagtagctgtggatcctagacaaagcacttagcttgcattcacaagatcctgaggtcagtacccattatcacagaacacaggaaagcctgagtcatactggtagatcaaggggatctcactgtagtttgattaggctttgttgttggttttaattttttaatttttgttttttgctggtgtggttgtttttcaagacagggtttctctgtgtagccctggctgtcctggaactcactctgtagaccaggctgacctcaaactcagaaattctcctacctctgcctcccaagtgctgggatgaaaggcatgtgccaccaccgcccggtgcccggatcaatttttaaattttattttatatgtttgagtatgttgcttgtgtgtaagtctgtgtctttggagacattagatcctctgtaactggagttacagatgattgtgaactgctacataggtgatggactcaaaccctgatcctttgcagaagcagcaagaactctcaactccttagccatctctttagaccctactttattttttgagatagcccagaatgaacttgaactcactatatgacctacaatgacctttcactttgatctcctgagtgctgggagtgcagccatacaccaccatttccactttacatggtggtgtggattgaacatttacctatgacacataggtggataggtgatggatagaaaagttaatattgataacattaagatgtatgaaaggatgtaagagtgttcatccttgtcttagacattttattggcatattccttaaatttcaataacacataaaattgggaagggcacagaatatgggcatcttcataagccgtaatgagattataaatcatctttgaggttgtaaagaggatatataagcctctttgaagtttagatttatattatcaaaaatgtaagtcccttttggttttcaaattgtttttatgtataaagaagtttgttattataagagaaacatagcatagatggatccctctccaaatcaattcttgctaaggtgtaaacaggtcttattaaagattagttttagctgtacattggaaaattaagaatccacttaaaaagaatgggacaaaatgaatcaaacttgtgttggtttgagtggaatgttccttattcgtctctggtagttgaatggtcaataagctactggaattgttgggaaggattaggaggtttggccttgttggaggagtcgtgtcagctggttcaaagtctaaccagtctttactataaagagcattctctgcctcctacttaagatttgagacattagctctcaactgttcctgctggccaacttaacacattcttttataagttcccttgatcacatggcgttttatcacatcaatagaaaagtaatggatacaaacctccggaattgttgcttgcagaaatataaattttattatatttgtgggggaagtgtttgagttaagcatacatagtaaatttttgaagtgtttcattttgttaaagtttcatactttctgtattatgtttatgtaactgaactgccattatccaaggttactaattcagaagaaaccagccagaattacttttatttttagtatatgacttttaagctaatagatagtaaaaggtatacattatgttttatattttcttacctgttgcacactgcttaggatagtacattgcatgaatataataattttctgagtgcaaaacagaacttcttaaatttttatttacttttaaatttcattttatgcatcctttttgccagagtgtatgtttgcgcactgcaggtgctcctggtgcctgagtatgtcaggacaggacctttaatccctagaactggagttgtgaaccaccatgtgaatgctgggaacagaatctacaacagccgttggttttaactgctgacgccactctctaatcctaatccatttttttttgagagcttttttttttcttcagaaaaagtttgcttgcctgcctgtctctctgtctgattgtccatccctccctgcaattgagctgaagtctttagtcttggctgtcagcacccttatatggtgaaccatctcccaggccaaagcagaattgtttacaggaacaattaagaatgattcaaaacaaataatttctttcagtgggttcagtcattgctctctttatccaattggtaaaacaaacattttacttgttcactgtataaaaatgatctgtgttgaaatcaaaaagcaatttatataaactagaggttgtcaaactaagacatttgaccaaatctgtcattccacttgacctttatgacctggaagtaaagaaaagtttttctgtttcttctagtttttaatagtcttatgtgaatgatatttgaaagtcaacctgcagtactttgagcgacagacagcctttcagtgcttcatgactacgctgtcgtcactgtggcagagctgagtaggcacagcacacactatgaaacctccttgctacctcatgctgcagcttggcacaatgcagatctcagtgatgcagttctaattacacagtattgtgcttcgtatgcatggttgtgctgtttctgcttttatttcattttttctattcgtgtgtatgagtatttttacctgggtgatgtctttgcaccacatgtatgcattatctctagaagccagagatggtattggatgccctaggactggagttacagccaatcatggcctacccatgggtgctggtgatccaaccatcacctctggaagagcagctggtgctctttactcctgtgctaccactgcagctgaaccttactactccatggcttgcatgccaaaacaagaaagggtactcgtggttttaagggacagtggaccatggaaggttttgcttcattctactagaggattactatacatactgccgtattcagactaagaacctgaagtataccaaaatcatggaaggctttgctttttcaattgtttttaaacacagtgtctctaaattcacgattacaggcatacaagcttgcacatagatacacaaagtgaaaatgagaccacacacaaagtatgtttgtaaatggctcattagccaagcaacagccatttactaatgacgaattaatcaaattctactttattgtctcaacaaagaaattcatttagaaaactaaatttgttcaaggattctagcctttgatggcagtagttcctttaagaatcgaggacactgagctcaattcaggagtcaaccaaagaagggaatttcatgtggatttctttggctgccctttgtttagtttatcctcccctccctccctccctctcttcttccttcccctctttttttcttctccccctcccctccctcctcttccctctcctgtgcttatctgatttctgaatcacccaaggtattcttaaacttctaactaatcgcccaaggtgatccttctaactctccttcctaggtgctccctccacagggcatgtaccatcacatataaatttctaaatgtgtttatgaaccaacaaacattggtcacttattcagggaacattattggatttgaaatgactgaagaattcagtagtttccactaaacgtctgtgtggaacatctgtagacagcactatttttaaaaaggtttgagaaaaacattaattatattctgagatgaagtttattgaagtaagctacagctggtagtggagcgtaaaaagctcaatgtaggtcgtgaacacccatagcttcagggctgtgggacgagcatggaggagacagcatcgttcctggtgcattgggagacacacacacacacacacacacacacaggtgtttggagtgagggtagagaaggggtccaaatgaaggaattttaaaagaatatgaaaatataaagtttttcttaaagcctatttgtgttcactgtgttattagctatcttgtgtgatgtatttgagtcaatcatttacttttaactgcacttgccctcatcaagaaacagtcctacagttggttttttaatttgttcttgtggtgtcagacctttaatttatttcatatatatactagtttgtttactgaaatatcctgatctcctggacagagctcagatttttctaagaactacagggttttttttttttttagctcctgttattgaacattagatgacttgaaaattagcttttgctgcagatttttatatcatttcttaaaatatctcaggatttatttattttgttattttatgtgttttagtgctttgtctgcgtgtatgcgtgtgcaccatgatggcctgttgcccgtgatcagataggggcttcagatgccttgagcctggggttagagtgtcaagccgccacgtgggttctaggaattaaacccatgtgttctgcaggagcaagttctccgaaccaccacccatttctccgtcccaaactgttaatctgcagtttgttctaaattgcaagcaaaaagttctgtgtgccagcaaaacaccttagttcacatttcagttctttttcaaaagttcacactaaaaatggtattctcgttctctcgtgcactctggaactggtagcagatagttaggattagattgtagtttttctttagaccttcatatagtgacacagttacccttcttatttcaaagtctactttgggctgtagtgactttctttctgctgttggattggaagttctgcttaaactgtagtaacatgctaaaatgcaaatatcaaaaattcattctaggccctggcatagcctcacaagagacagctatatctgggtcctttcagcaaaatcttgctagtgtatgcaatggtgtcagcgtttggaggctgattatgggatgtatccccgggtatgggagtctctagatggtccatccttttgtcagctccaaactttgtctctgtaactccttccatgggtgttttaagtggatgctcgcagtcagctattggatggatcacagggctcccagtcgaggagctagagaaagtacccaaggagctaaaggggtcttcaaccctagaggtggaagaacattatgaactaaccagtaccccccggagctcatgtctcaagctgcatatgtagcagatgatggcctagtcggccatcattggaaagagaggcttatcggtcatgcaaactttatatgcctcagtacaggggaacgccagggccaagaagtgggagtggatgggtagggaatttgggggggggggatgggggacttttgggatagcattggaaatgtaaatgaagaaaatacctaattaaaaaaaattaaattaaaaaattcattctaatggaatcatgtaaaaatgttagtttaaataatatcctttttgatttatgctagcatttggcaattgttatttgaaacgacgttttgaaagctgaaatacagagtttattatagattgtgttgacagaccaaaagttgccatcaattttgtttatatctgtctaccttgtttgtgtgtgtatgtgcacgtgggggtggggggtgggggtctgtctgtctgtatctgacagtggaggtcagagaacagccctcagtcaggagccccattttctccttccccgatcgtgcggattctaggaaatcgactcaagttttacagtttggtggcaagcaccttaacctgctgagccatttcactcgtctttgtcattaatttcgatgaacacaatcacacgtaaagcacaggaatagaaatgggcccctgcgggacccacccccagcacccaagtagttcctgaagggcctttgactgctcaccttctggtgccagatagtgctgtaaagatggcgcactctcattctttcctcatactgagctctaggctttgtttttaaagtttcctttcatggaatactttcttctcaggcactttgtgtcttaattatagtgccctcccctttaaggggaaaaacctgtttatattcagtgggattcaaaacacacttctcgttttagtgcagatttatcatcacccttcaggctgttctttaatatagagctctttagaaagaatatcttaagctgcttcccagatgttttaacttcagcaaacttgtggttttctttattggcatctttgtttgtagtatttggaagatgaaagaaaatatcgtctgagcatctaaacatgtttcacattgggtcttgagtgtcttttgctgccagggcatgactgggataattcttacactgataaattttcataatctttgcttttaaaaggtaattcagagctgtaattctgttaacagtaatgtaaaaacggtgtcttttctatgtgggttttgagtttacattgctatgctattcatgtctgttaacatttacttaattgcttaatagctttgactctccatgattcataccgtaaggattgagaatgcttcgcatccagtaccttttcaaacaaccagaagttcaaacttaaaatattaaagatgacaattggtccttttcagatttttctctgattgaaaattctcagtgaaatcaccaactgggtttctcctccacaattatgaaggtagttgataaaatctgttgcatgtttaacatgttcaaggtaatgaaagggaagaatgaagtcgagtgtctgaacacacggtgctggactggacattgctcgctgaggggaaggatgctgaagagcttgatttgatctgtgtcacttcaaagcatttgacttgtcgccacaggggctgacgtggtcctctcctgctcccgtctccctctgtctttctcttggtgctggaccgcatagtcttcaatagtgttttctactcccaacttactctcttcacctattcagagaacataattttagtaattttattagaatctcattaggtttcttaaaatactctgcgtgcatttctttcagttcctttcttttcttttttttttttcttttttggtttttcgagacagggtttctctgtgtagccccggctgtcctggaactcactttgtagaccaggctggcctcgaactcagaaatctgcctgcctctgcctcctgagtgctggtccagttcctttctaatttccttttgtcataacttgcggttgtgggttagctgctctttgtatagtcttccacctctagcttctatcagatgtcttctcttctctacgctgctaatgtggagcaggaaggcaaactgaacacagtaataaaatccaggacaaagcctgggtcacactgatgttcagttatagttcagtctacctcttttcctccggccttaaacttctggagctttcaaatgagttcagtaactttttgcctcactaacagtgaaatagtctaccgccaaattgttctaagagattcagtggaacaatttatccttctgcccccaccccccagaaattgggcatatctcaaaatgcaagcctaactttttgttgtagtcctcgctttcgtctcctatgattgttattgctcacccgttgcctgccatcccatccttgacctctactaagtctcagatgtattttcattgtctagatgtaacccatgttgatatatgttgtccccttcccccagagagaaatggtgacctagtttaatctttgatttattgagatggtcaaatcttcaaccctgcccccttccaccaacctcatagagaaaagggagaacagtattgcaggaggcgcagactgaagggtccacagtcacttatggttcgggcgtcctctctggctgctttcctcttcttgcccattgtggtttgcatcccctttccttgcttgtttgcatgcttgcttgcttgcttgcttgtttgtttgcttgttttgtttttttgtgaggtaccacccaagacaaccatttgtttttgaggttaatttttttagcctccttagcttgccattcattttcggaattcaagagatgtgttgctggacacggctatgtgaggtttggtaaatgtcaggtcacttctttccagcttccagttaccagctactgatgagtgcaggtgtgaaagagcgctgcctgttcctgcagtcgtactaacttctgtagagctatactaatacctctttggtgctattatttatatgacttcatatttatgtggcttctctagttgttgtcagcaggaatgttggctgtgacacattattagttacttggaatcggaagttcagtatgatgtgttttgatggggatttagatgtctgcctgagtgtttctgatgagtgatttgtttttagagtttgacagagaaacaggattagctcctcaaccgttttccatatccagtgcatgtatttctagaactcgtctctgatcggagaaaccctggcccacttaaatcacaggctttgataaagacaagaggagaaaggaaaccaataaagcaagccaagaagagcgtgtaatttgtgttttgggggtgcccatggataggatgtcgtgtgtgcttacccggagtcgccacatgtcattctgaggatcactttcctacagtcttttccttttacttgcatggcttaaaaagtaaatgtcaaacaatttattgtttaacgaaaattgtaaatgtgtttagtggaatttagttatatgtttttatgataggttcaaacctaatgcacgtgtcatttatgtaaatttaggagtaatcattttaatcatctatacttagtacttttccacagtatatttgattatctaacatgctaaaaatccctccatctccagagttataaatgggagtaattaaaccttaaaaaactttacacttgagtagagtaacggcttatctaagcagcacgtgcttaaaaccaactttttatcaaagaaaataacatgagaaggtagagaaatgcctctaattacagtccgcatgaactaacagcctaactttaactttgaacgactgttactttttccatctttttcaaatatccttaaatataagcacatgtgggaatgctctttggcttttatcagactgacattgcagtgatttttttttttttaacctcacttgaacatttgtggtaaaagatttcaaagctttgaatcttaaaatttgcttatggattccctcccccgtgttattctattaacatttggtcttaataagtataacctgttcggaattactgctgttttacatttattatttgtttagatgagaaagaggaaagaaaattgaaaattctgcttggcagttaagagtgctttctcatggaaactaatgtctttgagttccccgtgaagattttaattgtcttacccctcctcagaggcttaaacttcctgaattgttttcaaattactgatatctgctcctatactgagatagtttatacaacgtgaggtcgtctctcttcagacggatgttgagtgtgcccacatctcccttctttgcacaccagaacttttcttccctgcttccgtatagtacagcgactttagtttcattgacaatggaaagcacttgccctcagatggaagtaaacttgtatggcctggctctctgtgctttcctgttcataattcttatttccccatagagaataattggagatgtattataggttataatcatggtatccttcattttaagtagaagttgcttcatgtcacaccagtaagaaatttactaattaagaatcaactaaagccaggcattgtggcccatgcctttaatcctagcattcatgaggcagaggcaggtggatctctgtgagttacaggccaactggaactatatagatggcttctgtctcaaaaaacacaaaacaaccaaacaaaaatttaaaaaaaaattttttttttactgaatttaaattaaaatttactggaaaactccaaaatgttagtttccttgagccagtatactagagtgacgattttctctgcagctttcttctgttttgtgactccagtccgtagaaaccccatctcatttgctgttttaatggataacttgacattcagttgaatacagtagggcatggaagctgcatagtgcttataaggcctgctcgagaacgatctcattctagtattcttaactgctttttaatgtaaacattgggagtgttttagagactaataatgaaggtaataaaagatgtctgtcaaaaattgacatgctcacctgttaaatgagttactctgctcctggccccagagtcatgggggccgggggggggcagcatgaggcaggtcccctttccagtgcaccatcactgatccatcctgcataggaacttgtcaagtatgggaaatgacgttttgccctgggcctcagagccaggcttggcttcttactggtgcatttctccttctccctgtcagtgtactgggttggagtggacatattccttcaaaccaaagtattccagtgatctcagagacacacacttcatcttcttaggaagtttccagtctcctgtattataagtgacagaagtccaaaatgtctgcagcgtagggttcaggaaagctactcattcaattctctgttgagagaggtaagatgagaaatgccaagcactggcgagtttctcactgttggttttaaggttttcagtttttctgttcactcagatgatttcagaagtccacaataaaggacaagccaggaaacctttggtttattagttgataatagaaaaaaaataggagagtgatagagattttatgtgtcttctaaagtcaggttcattaacatacactgaagtatagtgtacgtaacaaattaactcctcatgtacattttaaattttaaaatgttgctaccatcagcaaaatcattgaaaatgcattattttctaagacatatatatttgtaattagcttctcttcagaacccctcatctgtggcagctgaccttaacccctttgttttgtcatatccagaaatctaggagaaaaaaaaaaaagaatggtcttgtgtgcccgctactgcatctggcttcttcacatggcttaccgtgttttcttagagtaatccataacactggttgttcattttccttatacaacagtttcctttctatgggcatatcaattagtttattcacaaatttatttttgaaatagtaagagcacagtgactgctgagatgcctgaattatgatttaatcatgtgtttacattttcctgtggaacagcaggcacttgtctttctgggttttccgccagcagcgtgccccgttacacgctccccaacctgtcagatgttgatattttcactgcttaatattttcggttttttttcaggtctttactgaaaagaaaatgcctcacattgtagtttcagtgtgagttttcctataactaatactgttgatagttacacttaccgactgattggctgaccagagtttcatgtcagcacagaagtgggaatgggaagtgggagtgttagagagaagggagggtgttgctcagggattcattttgtgtgatgtgaaatatactcccatagtcagttatgggtttgttagtgtcgttactcaggaataccagaaaggaaagtcggtgttcctaaagtttcttactaactttcccatgtgatttgcaagttcattaacttgttttggaaaccataccttacaagtgactaaagagtaggttggtgcacatctttaatcccagagcttgggagccagaggcagttggagctcttgactttttaaagacagtttggtctacagaatgagtttcaggacagccagggctacacacatacacacacacacacacacacacacacaccacacaaaacaaaaccaaaaaaacaaacttgtcttgaaaaaaaaccaaaacaaaacagaaaagaaaagataaaaagaaatgatatcacagcatgttcacattccgattagaggaacaaaactttttctgttaatcatcaaaatccgtagagtaagagtcccatgatggctttctaagttatagtgaatatttataggagactcccctcaagcactcttcccttctagatttcattttactaccttattgtgtgtgcacatgcaaacaacatgtagagttcagatgatgacttttggttcactccttccatgttaggttccaggaatgaccagttcttacagctgagcccaaatgtgacacccagactagcctcgaagaactgcctctacctctccagagtgtcttagtggtatgggcaattagatgtggctgttggtcttcttttttaattttgtgtataagactgttttatttgtgcgcacggaagtgtgctgtgcacacctatcccccctaaagccagaagcgagtctgtcagcttctgtagaactggaattgcacatggtatgagcaggccatgcaggtattggaaaccaaacctgggtcatctggaaaactagagagtacaaagccacctcttcaacccattcttgtttcagtgcatgtggttttctttatgctttgagtgctattctttattcttgactgcttttttaacttaagctggtatatcacaaagcatatattatttaatcctgcagatttctattgtcaaataaaacttctccaaaattgtttactattcttcattctatttcattctgaaatagaaactgggaatcttatgaagtgaccagtttggttttattttttatgcttttttgcttgtttgttttaatttttaatgagaacaagtaaaaactggttactgtgtcttgctctagcatcagttcttgtctgttaaattgttgaatcgctgaccttcacataacctgccttgactagttacaataaatataatgcttttgaagaggggagtttctctgtagtatactttcctgcatttatttctgtcagtacttgtgcctcgatttcaatggcgaagggcttgtattgtgaatgacattgttagtctgcattcacttggtcatttagcagctgcccaacggtcccgctgtccctttgctgattatggccggatgctggcaatccatcggttttagtctttccaaaagtcatcgttttagaatgcacttgatagcctcccgtgttttatgtggtgcacaatctcaagatatttattagtaagcagccagtgtgttaactgcggcttcacgtgttgctcattggtctttgaggcttctcttctcccttgtaccccacttgctttcctcaaaagtgaagcagatgtaaaacaactatgttaattgtccagcaattgttattcatgaaggagcttgtgatgtgaaagctgaaagcattacttagagcacctctcctacatatactataaaacaaggattaaaactacttttggtagaagcacggctgtaggtctgaccggccttcaactcaggctcgaaagacagagccaattggatctctatgagttctaggccagcctggtctacaaagtgagttcaagactatccaggcctatatggggaggctgtgtctcaaacatcaacaaactacaaaagcaactgtagaaagattagatgtccttcctttttcatataatgcacttctgaaattctgaactaaatttcagtgatatggatcaaagtgttctcatataaaagtatttaaatgtattcatgatgaagttgtggaacacagaaaagctttgtataaaggatgcactatgagtgttaatatttttcttcctggttatttatttattttatttaatttattacttgtaaataagaaattttaatgtagagtggagcattctggtcattatgttgaaagataaacataaactatcccaaattatcttggtgttttgtaacaataaatgttcatgccttgcatgtttttagtggttttttttttttttttgactttttatttattggtttcctacttctgatacaaagtctcactgtatctttggctagcctggatttcagagatctgatgcgtcacataccacacctacttttaatgccatctttatatttatgtattgtaattggcttctatgtgtcccgtagtgcagtctgtagataataatagttgcacagaatgtctgccgtttttgtgagtcacttagcggattttggatatttatgctttatattttttactgcatatcatgggaggataagcagctttttacatagaactttatgttttacagttttctctgggaaagtgccccagaaatagatttttataataattatgttggggagggaggtagaagaagaaggataaactggttgattaattgctcaattggttggttggtttggggtgtatattgtcaaattactttttgaaggtttctgtcactaatactgtcatttgtcaacattttcagacttctgttaatcctgagtataggttttacacttaaccacgtgctttgtgaaggaaactatataagtatttggttactaagcagggatgcatttggttactagcgaggggctcattgcttttcagcttttataagtttttttcttctgttcattgtacatttctctggatcttcataagagatagactagataaatatcaaagttttctttttattaatgttagactttacatttcttacattttatgtaggaaagcttcatttttttatataatcaaaattatttcttctatgtgtctctgtcttctggaagctagtaaatagttacttagatagatactgaatttcatttcaaaatgttccccaccctcactatagcataaaataaactttgcattgtcttctaacgtcccttattttatttaaaaaaaattggtgttagtttaattctttttcatttctagatcatcgacttttttgagctcttccatttttattctgtatgtgtttagagaaggtttagagaagtctagattgtgtttttcttcttagtttaaaacttagggtctttttttctattttttggtaagataagcagctttttatagctgttttctctgggaaagaacccctgaaaaagaaatgtataataaataggtgggggagaaaggtattgctggtcttttttcctgatctaacagtgaatgttagatctcctaagtagatctttttctttgtctttcatagtttatgtcatatttgtgatctgctctgccatagtttccttatttaataatattcctttactgcctgcccaacttgtcttcttgggaaagtactgtcctgtttgggctctttacacatagttagacaatcaagttttcctaagtaggttgttcctcagaaagtaaaacatttgaatcaagaggaatacacacaccaaataacaatgaggatgtgtctacacaacttgtgcgtgcattcatagggaaaaaaatggacagatacattcatcaataaatgtggtaaaataaaccctactacagataaaattcttctcttaggcagtgttctgttgctgtgaagagatgcctaaccactgcaactcttgtaaagggaagcatttaattggggcttgcttccagtttcagaggtttagtccataatcgtcatggtggggagcatggcggcctgcaggcagttatggtaatggagaaacagagttctacatctagatattcgtgtagcagaaggcgagcgagagcagctgggcctggcttgagcttttgcaactccaaattctaccccggctttcacactttgtcctactaatcctttcaagagttccacttcccagacgttaaagtacaggagcctgaaagtattttgcgtgaaagaatcttaatacccatcctaccaaaagcaatctacagaatcaatgaaattcccatcaaaattccaacaggtttttcacagacatggaacgaacaattcctacacaaacatgaacataactgtggtgtattttaagtgaatgaatatgtttgtatgaagtgcactcactctgtgtgtgtatgttgtttgttgaccttagggtctctcatgtgctctctgcctaacacattataacttaaaactgttaggagaaaacaaggaaggtgggaaggaaggaagtaggggaaataggaagattgaggaaataaaagaagtagaaaagctaattctcatttctgtgtagtctgaggatctttaccctgctcctacaagagctttcgtatggcagagcaaactcttaaattcatctctgagcttaaggtgggaatagttttacaaatacaatgcttaaaacccataattttactgttttccattactacctgtttcttatagttgatttttgttagaatatgttattttgttgtacccttgaaattctgttctaattttcaaattttttcatgttatataaaacgtaagttttaaaattcagtaagatgtggaattagattgaaggcgtgtgtcctcatctattttgaaatgtaaaggtacaatttctaggtctttcataatgactgcaagggcatttcatttcctgtagaaaactcttgtgtgaataagaaaaaatgctcatttttaaatttcacataattctcagatgaagtttttgttcttgttttgttttgcttttgagacagggtgtcctatagctctggctgcccttgatcttgctatgtgacctgaatgaccttcagcttttgatatcatgtttttatcccctgggattgcaggcacacaccatccaatccacaggattctggctttgaaaagccaacatatgtgactttcatctggcgaatttactgtctatttagtataacggctaagttcagacagtatatattttagattcttaaaattatatatttactgaagaaattaatttcttgaatgaaaatatataattttaagatcccactaattatatttatttagaagaatttgcaggttgtgaaaaactgacatgctaatttaccttctactgtggttttattgtaggtttgatgaacttgtgaaaaaattcaaagttgaatatcatgctggtggctctacgcagaattcaatgaaagtggctcaggttagttaattattttaaatttaaaaattttaagtagcagtgtatcaaaataattctaaacttttggttattttaaataatactttccaattttattttcacaaaacacttgtttgttttcatttgagtctttaacagaacatctaataagaattattttaacttgcctttattggtaagcttggaaataattcagtatgtttatttattactgttatttttacatgttataatttagtagaacttgatatttaatggacaaccctaatttttcttttataagtgaaatgtcttttttgtttacatacaatgtcaactacgttgcgaaattcatccttcatccttgggtggctcagtgctgccttctgttacttgaaagtagagtcttgctctgtagacttggatggcctagagcttactgtgtgaactagttgggcctcagagttctggagcactagaatgacaggcactaagttagttaatgtaataaaaatctgttcattttatagatgtgattacatccacttgtaatttgaggcattttccaggctcatgcacgtaaggagaatcagagatatgaggctagcctgggaaacacaacatgaccccatttccaaacataacaaaactctatgaattttgtatctatatgatgttgagaaaggatattgctatagcatattaacattccttattatataaatacatggatagaatatgtatcttattgtttgctttgtttttatagacgatagggtctcactgtgtagctctgactggaacttgccatgtcaaatttattgatctgtctgcttcagcctcgtgagtgcttgctgagattaaaagcatggaccatcaaaactggccaatctgtttatatgttaacatctaagtgtgtgttttatgtattaataaatacacttatatatttatttgtaagtgaatctatatatttttaaaatagccaaagcatttagtaacactgaaataaacacatttttaaatatagtctgaataaaccactaatctgatgttaagatttaatgttaattttcaagctccagttggtatgaaaaaagctaattgctacaatttgaaagttaacttagtaccttactctttgtagtcatagttcagttttcaatgactagggtcattcttgtttgttgataatgttttctccttgaattctaattaactttaaggactggagaaatgtaaagctgagaaataaaatttagagagttgtctctctcctccctcccttcttccatttttattagttgatttaaatgtacattttaattactctgcctaccaaagctgtaaatattaactgtaaatattgtttttattatgttttattatgtttttattatttaagactgtctttgtcaatttatttctattgtgagctcagatcaattggagataaaacaaaaagagcaaaagaagcaaaatccagtgttagtggcccaggctagtaacaccagctgcttagacccaagcacaagctgaatacctgcgtgcctgggttacatggtgaatttgaggctagctccagaaacttggcaaaaatcttatcttaaaattaagattctaaaaacactgttgcaacttgtaggatgggtggctcattcttgtgatgtcagcacccgggggcagaagcaggcaaagctgaagttcagtcagcgagggccataatgcaagattcttcttcccttttctttaatggctgacaaggtgcttgagagggtgaaggcacagcctgagtcttgtcccttgagttcacatgatggaatgagacaatctcttcctgaaagtttctattggtttccgtacctacacagtacacacaacccagaaaataaactgtagtttgtttttaaaagtcaagtacatagaaaaagccttgagctcagtggtagaatgcttgcttagcatgcacaaggccctgtcttctgtcccaagaactgcatccacaaaagaatgacttacatgtttgattttggatattatattaatttgttgtggcaaccatgtcagaatatactgattgaatggattaaataacagaatttatttctcagatttctggaggctagaagtccatggactttcttcctctcatagatcactgccccttttgatgtcctctaattatctttttctctgtatgcttggaacaagagatgtctggaatttgctctttaatgcaacttgtgtttcttatgcccacatcctcatgacctcctttcatggatttctttataaagtctaaggagtagagctccacgtgagctgaagcagagagtacggagggctgctgtctttcctcgcctctctgctcctcttcactgttttctcttcctagagtttggaagctcttagctcaatgctgactgacaaattctcttatttcttggggttctttaatatttcatgttaaactattagtatagttttgttgtcgttcttttaacatttatattgcctaatctatacgcattaagatgtcggctatcaaaacaaacaaatgaagtacggacatttaaaggtcaccagcagagatacgggcagttggagaccttgtgccctgggatgagaggatttatggtatcactgctgtggagaacgggttgctagttcttcagtgaattaaagctggtgttaacctcatgacccaagagttttgtttctgcatacaatgatttgtttatgttctaatacacatggtttgaagtgtaaattctctctctctctgtctctctctctctctctctctgtctctctctttctctgtctctctctctctctcagtctctctctctgtctctctctctctctctcttttttccaagacaggaattctctgtatagccctggctgtcctggaactcactttgtagaccaggctggcctcgaattcagaaatctgcctgcttctgcctcctgagtgctgggattaaaggggtgtgccaccatgcccggcttaagtgttttttttttttcttttgtttgttttttgtgttttgtttttgttttttcgagacagggtttctctgtgtagccctggctgtcctggaactcattctgtagaccagttggcttcaaactcagaaattcgcctgcctctgccttcgaagtataaattctcctatgtaatcatgtgtggaaacgagccctttggtgtagtaactagagttagataatgtcctgcaggtggatttgaaagagtgggccagtggtcttataaaaggtccctagggatactgcattaagtaaagtaagcctatcacataatttatgtttctattcatatgtggttctgttgtagtctgcttcatagagaatgttaagtggtcattctcaaagactgggaggaagacaattggggagttattgtttacttcgtacagagtttctttttttgtaagatgagaagtattctggagctggatggcagtgtcatttgcacagaaactgtacttatacttaatgctaatgacttgtatgccatcatgtgcttcatagcagtgtttagggtaggagtctcatgtacctcagtgattggattgtatagacatagcctgtgatattcttgtaacggtgaaacacctcataaaaagtctcagaagacaactgttgctcagtaaaagcacagctgtaaagttattagaagagtaaattttgttttatggaatatttatcataactgataatttataaaagattttagtcattggtttaatagtgaagttgagaatatggactttggtggtaatggcacatgccttaaatcttaagacgtaggatgcaattctagttagatttctgagttgaggccagtctggtgtatatatgttattagacgcgttctcacgaccggccaggaagaacaccacagaccagaatcttctgcggcaaagctttattcttacatcttcaggaacagagtgcaagaagcaagagagcaagaagcaagagagagcgagaagcaagagagcgaaaaagcaagagagcgaaaaagcaagagagagagaaaagcaagagagcgaagcaagagagaaagaaaacgaaaaccccgtccctcttaaggagcattctccttcgcctcggacgtgtcactccttgattggctgcagcccatcggccgagttgacgtcacggggaaggcagagcacaagtagtcataagatacccttggcacatgcgcagataatttgtttaccacttagaacacaggatgtcagcgccatcttgtaacggcgaatgtgggggcggctcccaacatctcccccctttttcttttaataagagcaaataggccacccatattaatgagagtggagatagaggtcaaatccccagtgtgtaggtaaaggagccatgtacaggattagctcttaggcttacaggcttttacccagagcaaccctgacctgctcccgtgtcgttttgcctgggggaagggaactaggacactgaaccttcatgaaagatgacatgtctccctagaataggctcatatatgccgcagagcctttccattgcagtgcttagccttgcaactctctcgggctgctgaagcacactcactctatgcccgtgcaatgagtctagcctcatgggatataagagctgagtggccagcgacctattgcctaagcatagatnnnnnnnnnnnnnnnnnnnntaagcctatcacataatttatgtttctattcatatgtggttctgttgtagtctgcttcatagagaatgttaagtggtcattctcaaagactgggaggaagacaattggggagttattgtttacttcgtacagagtttctttttttgtaagatgagaagtattctggagctggatggcagtgtcatttgcacagaaactgtacttatacttaatgctaatgacttgtatgccatcatgtgcttcatagcagtgtttagggtaggagtctcatgtacctcagtgattggattgtatagacatagcctgtgatattcttgtaacggtgaaacacctcataaaaagtctcagaagacaactgttgctcagtaaaagcacatctgtaaagttattagaagagtaaattttgttttatggaatatttatcataactgataatttataaaagattttagtcattggtttaatagtgaagttgagaatatggactttggtggtaatggcacatgccttaaatcttaagacgtaggatgcaattctagttagatttctgagttgaggccagtctggtgtatatagtgagttccaagacagccagggcaaaacgagaaaccctgcctggaaaagcatggagttagagaaggcacttgttcttgggagcttgggaatatattagaaataggtttaagttgaaggttttcgttttattttgtttactatttggatggctttgaagctgtaaggaatttatccatctttgaggggaaatagacatctttatctttaggtgagatgaagtcctgcattggatggaaattttaagagttaaactagatactgaattttagaattatactattttctatgatagtttaaaaagtactagggctaaacacattaacctacttctttaagaattttcttaatctagtggatggggagatggctcagcagtgaagagcactggctactcttcaagaggatctcaactcagtttccagtatctaaatgtggctcacaaccacttcctgggtatctgaccccccttttctggtatacatgttgtgcacagacatacatgcagacagccttttaatactcataaaaagataaagacaaagaacttgatttgtattttaaaatttaaatttacttgttcctgaagagtgctacaggttagaactgccatcttcttccatgattcgaactttcagttgagttgaatatcttcttttgatttttacttttctagtatttctggctattttttttccttctgattagtgagctaagtacattatcaaattgtaatttacaatgaagataggataagtgtatagcttcaaaaactgtactcatgtggtttgttatgagaagttggtcaggttttactgatagcaggaagtgttttcactgttaagtagctgttggtagattatctgatatctgtgttagtcatcatcttagtgaggaaacagtgacctaagatacctgtctcctcataaaatatagtctggaaaatatatttagagtcttggagtctttagtcctgatgcagtattgttataacccttgacttgaataaataagaaaattgaagttggtcttaaatctttctggaagtcaagccaagtaaaatagaaaagtagtgcttgtcattaaattatggattttgtattgatagttgattgtctttttaacatttttaatactgtgtataagtttaagttataaaaataaacataacagtctcaacaaaaccaactttcaaatgttaacaaaaatgcagcttacttgactatggtgttgtcacggtggcacacagataactggatttgggacagaagccagtgaagcagcattgtagtataacagaaagagttgtgggttggaccagaaagattgtgaaagcaaacatgtagaatacgagacaactgttttctcagtcagcaatttgttaaaaatgaactggccccttttctttttttaattagatattttctttattggcatttcaaatgaagtcctctttcctggtttcccctccaaaaaaccccctattccgccctaccctgcctgctggagtgatggctcagtggttgggaagatcaagtgcccttccaatggtcccaagttcaagtcccagtaactatttgatggcttctatctgtctgaagtggcacttacctgacataatgcattagctcagttatcacttaggcaccaacaacttaaagtcacattaatggaccagaaggttttactctaatagctcctgagacaaccaaggaacatttcttcaggtaagctcttcctctgtaaagcttctcattggtgagtcttcttgatcagactccagggtgttgggaacgttttttgatagtgaatgtgttgacttggttacaatgtagttttcattctgtttgatattatcagtaatcattcattcatatatatatatctgtgtgtatgtatgtatgtatgtatgtatgcatgtatatatatttactttaagtgatataacagatcatgtcaaaacaaaaatgttcctaaaggccctgtgtattttggtttacttaaaaacactaaagattttaatggtgccataactacatatgaacatatatttgtcagtataaatctagtctcatccatatttgacagtcagtaaaagtacaaactttggcaatttccacacacttctttgtgactgtacttttgtgtgtttttgaagacagggtctcactgtgcagctcactgtgtaactgaactcagttctgcccacatgcttctactgtctaagtactgcattaaaggggtataccaccaactgtcaaagatttatttcttttcatgggtttctgtttgtgagcccacccccttccctcaccccccacccccagtttgtgttctgggaaccaaattcaggtcctctgaatagtgagtgctcatatctgctgagccatcttcctgctcctcttcacacctcttatttgtcaaaaagcagtattttgtgtctgtcctgcagagaacatgaaaaggaagtatgattttcctcacctgtgatattaatggtttcatacaacatattttcacataccaaaattaacagatcacccaatttcagtgtgtggttttctttgctaggttttttttttttttttttttataaaatgaggttaatttaaacattaaaaaatatgtatttccattcaccgttcaactttttcaaatgatatctaatgcaactttaaacttgaaagacacaatagaaggccatcatgcatgcgaacctaaaagatgcctttggtgttagtttatggctcagtggcttaaacagaagagtatttgtctaacatgtgcaaggccctgggctcaatccccagctcctaaaagataacaaaaagataatatcattgtctataaacagacagaaaaacagaaataccagttgtttaatacaatacaaacttgaaggctgaggcagaaggattataagtttcaggtcagccagcatggactacacatcaagacccccatttctaaagaggtaattatttgggacaaaataataaaataaaatacaagtgtccattgataatatactaagcattagaaagaaaagtattatgttgtagcagaaattcggatgcattttttcctgaaaggtttaatgatatttgagcatgctataacaaagctggcagaaactcatacaataaaatattgcttcttttttttttgataaaagtgcttcaatcctatagagtaaccatcgtgtcctctgaagagaacttttggagctggacagagtagatgcccagcgtgtgagcattcatcggccgcttatgctcagcgctttatgcagatcggagtctttacagtgactgccacacataggtggaaccaactccatatggtagatctgtaactgcgaagaacatgattgttaaacactaatgcatttagactcaaagtgtatgagttgtgccctgagttcaaaatgtatagaatcgcctaataggattttgttttctagcaagtagtttttccacagaaatgcaaactaatctctctagtatgcctgttcactcacccatcaccacctttttttgttaattatcataattagatctatactaaaatctcgtcagttgtacttaacactcttaaaacattttcagtgatatacttttaagtatatataacatggtatataaaatttaattatcaaatagttcatagtttctgtgcatgttcatgttctatgtctcttatattatatatattatatgttctatgtctcttatattatatatattatatgttctatgtctcttatatattaatgtcagatgggatcatgacccatcatactagcctcactaacttaactctcttgttaaaagcttgtcttcatatacagccaatttctgtattgttggagattggtgcttcagtacgcttccagtcccagcatatgacagacaaccagacacacagtgctttggaaggaaagatagacatgttagacgatgagtgccatcaggccattgaggggacttatttacaggcccctgtgagttaggttaaaggaagggggcttatgtagcaggcagggcaaaaatcacttcatctgagtgggaagtatctggtttgtatcaagataatttcaaagatgtcggtctattcttggctttgatggtaccagagttcagtcataaaactctgcataccattcaaattctttagtttatttatactatgatggggaaacataccagagttacttactgaagggtacatggtagtcacgtctcttgatggctgcagtcaggacaagctggatgactgtttgtaatacatgtaaattggcaggggtagaggagagactaaaattagtcattaacagtcaccaccttttacttttaccttaaagtaacagtccttatgtgtgaatgagtagtgctagtatattattttggctcccttctttcttttcttttcctgtgtcatttaattagaattaaccttctaaactgatggcaagctaatttgaatatgtagtatagaaacacttttacatctccaacttattctcttagttactgctgctgatcccatctttatatactgtgttcacattaatatagctttgtaatgattatctcctacatttccctctcagccatttataaatataaacgtaattatagtgaaatgaagttgtactaggaagtactttacacacttgtgtttatcacagcgccagagccagaatgttgaataaacccaaatgtccttcagggatgagtggatatatctgcacagtggagcactattcgtctctaaagcagaatgaaacctgtccttctgaagtagcgttgtgttaagtgagacaaaccagacacaaagacagataccgcatgtcctcattcatttgtggaaccaagacatcagctttacagaagattggacaggaatgaagtgatccccagagcctgagtggggttgtggggaggacggactgaagtccattatgggatgctgaaaacagtgtagtaattgttccaggatctcctttatcacagtaggcttagaacagtctatgatgtattttgaaatgtaatgttagcactgaggaggttgaggcagatgggtcacaggttcaaggtcagcctgtgctttatatgtatcaagaccctaccttagcactcttccttctcactataggaaaatacatctgtgaaaattcaatagtactagcattcatatttacttatgtagttgccttttccaaagccctgtatttattaatatgggttgtgattattgtctactttcctttcattgtagcctgaaggaccacttaataatttatgtagggctatctacataaatagatatttatatttttgtttgtgtgttgtttgctttttgtgacaaggcctcataatcctggatgtccaagaactcacttggtagacaaggctggccttgaactcacagatctgccagcctctgaatcctatatggtaggactaaaggagtgtgccacacctggcttgtggactcttagtaacaaactttttcagtgtctgctttttgaagggctatactttctcctatagttaataattaagatgaaatataaatgacataagaattcaaaataaaattaactggtaataatattttgtgtcttgatatgcttatgaacatgaaaaggtgaaataaaaatctttaggcttagtctcaacaaatacctgtatactatatactttatactatatactatatactttaggattttttgtttgttttgggaggggggtttcaagacagggtttctctgtgtatctctggctgtcctggaactcactctgtagaccagactggcctcgaactcagaaatccgcctgcctttgcctcctgagtgctggcattaaaggcatgcgccaccatacccaggtttttttttttttttctcttttttctctcttaactaagatgtagcaattcttgtatttctagtttctttgttacatgtcagtacattccatctggcaaccatgacttctaatgaggatgcatcttattttggttctgtagcactgtagaccaactaataccctaggcttgacccatattctcccactagattaatgctgctttcactgctgccccttcctcattcctttcaagacagggttttatctggtaccctgaatggcttggggccttgaacttgtataccctagcctctgcctccgtaatgctgggatcccaaacctgaattatcctgcctggctagctcatcttctatgttttaagggaagatgattttcctttatgctttggttcctttaccttcttattctttgtaaagttcaatataatctgcgtataatcactgaaattggttttctctctgttaactttcaatgttgaggctctatgaattttatgtttatttggtaatgaagagtaaattttcatgttacttcagttaactaccacctttcttaatgtagtaaaattttctttctcaattgagcaatggtctttgggtaaatttatacttctatttttgctataatgcaaatcatttcatccaaactactaactagatatgtgtcagctcctgccagatggcccccacatcccaactttgctttaggagtagacatgagcagtgtgtccctaagcacagcttgccgttcataagcacatactcacaactcacagtgctggtctgagttctcttcatcagattaggcacctagattgcctgtctctgaagcctgtctcaggatttctggtttactcttacacaccttagcctagaagtggaggagtgatgtgacttgcttgtataattacaaactttttgatcttccagtttctgatctctcagataagcctccatatttacatttaatctgaagtaattttttttatattgtatttgtatgattacactattcctcccttcagacacaccagaggagggcactgaatcccattacagatggctgtgagccaccatgtggttgctgggaattgctcaggacttctggaagagcagtcagtgctcttacccactgagccatctccccaacccctgtagtaaatttttatcacttttctgttttatctttaattaaatcctgaaagaactgcctatttttgtttaatacagaatatcatctaatgttccagtttcagaatttaaaaaaattttaaaccatatatgtactgggtgtctaaaacatgttttcaaagttatgtttgaatacaatagaaacattgacctaaaattcatagcgttatctcattatttagcctttccctttgagtaactgcatttagaagttaaaatattctgattgtctactttttttttttgacctatttcacctagtctaagagtgttttatgatacatctctggaatttttgatcagtctagactacttatattttagaagaagaaatggctctggagtgatcaaagggaatgctctgttctaacgccttacacctggagcagttgttagcaccgtcagcagcacagctgtatttagacatatcagagcaggatgtggcagatggtgatgcaacagaggtcctgtcagatcctgtccgggaggatgagatgcctggcaatgccaagtcaaggagtaatgagtcttaagaagcatgaatcctactaagtatataactgacttttccaattgtgagttcttgtagtcatacatttctcagaatgaattaacaatccattcaatgacccttttccttgttgaagtggattattaaattttagtagttaaaatcatgaaagcagttgtcctttctcaaatttttgtttggaaacatgctttttactttgtgtcagatttaatctaaaataactctagtatttcatctcctcctttccccctgcttaacccctagacctgactttgagaaaccttcacagaagacacattttagaacatgtctcagcaactgggtttgtactatgaagttttctggtgtagaacagcatgtcacagtccatccatacagaatggcacacatctaccttttctgggccttgaagtcatagcaccccaatatgtgacattacatatgaataccatttcaatgtgtatccctgctacctcagttcaaagaggagagctttagaaaggagtaatggaagtgaccttctgtttgtcaccggtgggtcttacattttgtcattctgttttgcaattgtaattcgggtgcgttaaaggaagcaaacaaacaagaaaaccagactttgggttgtaatttcatttatttaaaaataaaattaaactcatttttttcctgacaagtctcatttatcagttggtaaaacaaggatagtctttgccaattcagttgtgaagtgtagttgttacctgcactgtttataatgaagaacttttctttataaaaaaaataataaaataaaatgtctcaagtcaggaagcaggcaggctaactgaagatcttcacctactgttccaattctccaactgcaattcccctgtctcatccctagctctgcagcagactagctcatgcatctccccttccccctcaacccgtctccagtggatcacagagatcttcccctcctatcctctttcccctcaaactccagcaggcagcccctgggaatacacaggctactgcagccagtgagtcaggaaggctaactgcactaagaatccaggaaatcggggacactatgaaaatatcaaaaagaggaagaataggaaaagatgaaggagaaggtcaagcacagaatatattttcaatcaaatcacagaagaaaattcccctaaccataaagaagatgcctattaaggtacaagaaggtacagaacaccaagtagactgggcaggcaagacagttcccttgccacataataatcaagacactgaatgtgcagaatggagaaagaatactaaaagctgcaagggggggaaaccccgtaatctataaaggcagactgattggaataacgcctgacttctccgtggatactctaaaggtcaggaagagcttggacagatgtttaccagtagagactactataccaggcagacctatcagtcacagtagacggagaaaataagacatgcaatgaaaaaataaaattttagcattatctgtctagaaatccaatcctacagaaggtgctcgaaggaaaactccaacctaaagaggttaaccacacccatgaaaacacagggaataaatcacacacgcacacgcacacacacacacacacacacacctttcacaacaaagcaacaggaatcaataaacactactcactcatctctcaacaacagtggtctcatttcctcactaaaaagacacaaagagaatggattcaaaagcagtattcatccctctgctgcatctaagaatcacctctaatcattaaagataggcatttcctgacagctaaaggatggaagaagatattataaacaagtggacctgagaagcaagctgcggtagccatttcaatatcttacaaaatagacttgaaaccaaaactaatcaaaggagacagggaaggatatcagtcatccaagaaaagaatacccaagaagagtactttgtaatttgtaataacttggtatcaaacacaggagcaccaaaatccagaaaagaaacattaccacagcttaaaccccatattaactctcacacactgatagtgggagactaaaatagactggccatctagtcaagagctaaacagagaattgttggaactaactgatgatagaaaccaaatagaccttacagatatttacagaacatttcacccaaacagaaaatattatatctcctcagcatctctttgaactttttccaaaactgcccacatactcggacaaagtgcatcttttgatagatacaagaaataactccttttatctaacaatcacaatataaatctagatatcaacaacagaaaggactttttgtttgtttgtttgttttggtttttgttttgttttttgtttttttgttttttgagacagggtgtctctgtatagccctggctgtcctggaattcactttgtagaccaggctggactcgaactcagaagttcgcctgcctctgcctcccaagtgctgggattaaaggcatgcgccaccactgccccagaaaagagtttttaagaattgaatgaaattaaatagacaacacatcaaaccttggcaggcagtattgagacctaatgcaataaaagcttcctacagtgaatacataaaggagatctaaaggaaattgccagataacggcaagacaggcttaactggccatctcttgtcaaaccctggtattgcaaatgaagcttgcaataccagggttacgttacatctaattgagttgtcagccaaaggggtatcatggcagtccccaaataacccaaggtcttctcaagattgtgcattgcttttcacaaattgagacagggcccattgctgaagataacacattacttattgagcatggagaagttgggccggtacctacatagagccttcacccctatgtctgctacaggaagtgctctgaatgccaccaaaagagaaacaaacaccaagctcagcacaaccctttggatctacattaatatccagtctgcaagatatacgagggcaatattgacacaaagcctgtgggagtatccaccaggctctggttggttgatttgacttagggccccctccaggaaatcgaatccataacctatactgattgggtgttcaggaacctgagagtagataacccggggatctagggtaaaaccaaatactactgtttaaaaaaaaaaaaaaaaaaaaaaaaaaaaaaggtaaaaggatacaacatagcaataaaatgcctcctaatctcattctgctatactgagagagcaacatcacgctcaaccatcatcacaaaagctttctcctgcagcagataggaacacacacagaaacatagtcggacattatgcagaaagtgagagaagctggaacacttagccctaaggaggatatgtctaacacatccgtccctctctataaagaccccaggaatcctgcaaaaaaggaggttgaagcgtgtaagagctggaggggctggaggacagcaagaagacagctgtctaaattaaaacaatcaaagcacatatgaactcacagagactgaggaaacatgggcagtgcctatactcgtctgcaccaggtcatctgtgtacatattatggcttccttagtgtgtgaacagcggagtttctgatactgtgacttctcttgtgctcttttccttccgtttgtttgttttgtccaattccaatgtgtttcaccttactaaattttatttcattatttttccttagaagcctattttctaatgagagacagaaagagatttgtttcagatgtctttctagttcatcaaaatttaaatgctgatctggagaccaaatgattgttcttagtactgagaagcatacaaattgtaatgtagttcaataatagccaaagatgtgaacctcataaaatcagatcacctagagaagactactccaaacaatgactatgggtctgtaattggcaccccagctttttttggtcaatttcaaaatctttcaattgttttacatagtttctgacttcacatggtgtgttgttacaattgaatgacataattatgaacagtacacctagtccagtgctcagatataagagttcagcaaattgtaggtggtatcattgcatagaaaaaggcacctgacagttgcgggaccttacttgaattgtaagtctggcagtttggtgatgatttgtatattaaagtggtaagaacaaacatgacaccacatttgatcttagctaagaggtttaatacaatgatgacgtctgttttctccagacctttttttttttaaacaactattcatctcaaattctctcaaaacgtaaaatgggaaactcatccctaaaatgttgtatcacaattatatgagcattacaaagtttaaaaagtgtaatccttttttgaattctgggatatttgattttttaaagaattattacctgttgtagacagtggcatgggatacgctgttactgttgggatatttgttgattgttaccgagagttactcccattatttttcctgggtgtgttgggtatttttcatccaaagctgtaggttgtacatgttccacactgcttgtagtgcttatgtacaaattgtttttaaatccaatatccttcaaattagttttgattaatgacaagttatataaaatttctttttgaaaacaaaacccataattttgtaaggaggtaatgcgaatccctagtaattacatggcaagcagtttagtgtttatctgctgtaacagagttttaattccagagtatgtgttccgtagtttttgttacatttctcatattttctaatcagcaattaagctaagcaagcatcgtagaaagccctgggcatgttgtcaaaaacaggaagcttgcctttcaaggattgccttactgtgtagcaagactcttaagtttcaaacaccaggaacaacaaaacctgcatgatcaagagagaggatttcaataaatttagtgtaatgattttggttgtgttgttgtttgtttatacacagtcttgccggatgtcctggcatcttagttactttttaaaggcagcgatagaacaccctgaccaaggaaacatccagaaggaagctttaattttctcttcctagtccagtgggacagaatccatcaccatcatggcaggcagcatggcagctgtcaggctgctgagctctcatgtcctgtcccagagaagtaacagatagcctcttaaggtgatgggaggcttttgaaacctcaaaggtgcctggcaaaacacctcgaactaggtcacacctcctaattcttcccaaacagttccactaatagttgacacatgcctaaaatgtaaaagtcttgataagctttgtgctggctagttttatgttaacttgatacaaagtatagtcagagttaggttagagtggaaaaaaaaaattttttttttttgaggaagtgccttcatgagatcaggctatgtaggcaaacctgtagatctttttttcttacttcatgattgatgtgggagggtctagccctttgtgggtgacgctacccctggactgatggtcctggattctatgagaaaccaggctgagcaagtcagtaagtagtccttccctgtggcctctacatcagctcctggctacaggatcctgactgatctgagttcctgtagttattgtgagttatgttgtcttggctggtcattcaccacacagtccaggatggcctccatacaaagaccctcctgcatttgaaggaacagccagccctcttaataaataagctgcttttgctgttgggctcttctacagtttatttataatgacacctaagaagttgaagatagcataaacttcactcccacataccagtatttgtgtggcattccttaaaagatttttagacaattttaatagttatagcaagcttgctataaaatcataaattacaattatctatttttgagtttctgttatatgtgagtttgtgattacatagatccttgtattttaaatatgttttaaggaagttttctgcattgttataattaattgtcatgtagtttattaaatccaacctttggacaataaagatgaatgtttcaaattatggagcatgacagagcacagtagtcttgctgggttttataccatattctgtagccatctcctttgaggtgttaggaaagacctcactccctgcacatgtgccatgtgtttgcttttcttgtatattagttgctcttgttttttaattgtaaaatgacataaagatatccattctttgtaattgtagcttaagtatggcccatggacacattgttatgaatgatgttggatttcatcacctccatcacaattaatttgtagttacgctctatgtgtgtgtatatgtaagtatatgtaagtatatacacacatgtatatacacttatagacatatatttatattttcataaatatatatttataaatatatgattatatataatataataaatatataaaatataataggtatatatttaaaaatacttagtgtattggttatatactatgaattatccaggagagagctagttttaaagtagctttacattgataactccaggtcttcccatacttattttatccaggaatggtggctcactcatgtaatctcaatatgtcaggactgatgcagggaaatcactttgtgttttagactggcctcaaccatacagtgaatcccaggcctgcctggtctcagagtgaaactctgtttaaaaaaacaaaaccaaaactgttaacaaaataaattaagttactcatgttgccactcctttgaaagtgtgcaggtgtcttctagtaacatagtgttatttgttcaggttttcagaatcacataccatggtttaatcttaaacttgagtgaaggttgattttagattgaggtgtatgttgtcagtttgtaagtaaagatctgctattctctaacatgctttgtacaagtgtttgtctttaaaacaagtaaaaatatactaaaattacacataatctttcaactttattttataaaacttttatttatgtgttctaaaatgtagtgtgaacatttcaaacaagttctctgacgtgcttctttgtaaaaaggagagaagttattcatgaatcctcgataggcttgatgactccgtcctaggatggagaatgtgtatcaagaatggtgtgctgttgccggaaacggctgttgttcccacattattatttcggaatataggtagtaaggaagtaacaggagcttttatccaccctgtgaagaggtcctcagctagtagagcagagctgtccagtagtgatcaacaacaggatgtcagggtacatggatgagccagctccagtcaaacttgtagggcattggagtccgtgccatcttactgacctagagaaataagttaagccatacctgctctgctaagtcacctcgggtatttatcccacaaaaactatgtagaatgctgtgcattgttgtcaatcagtgtgtttacagaggctaatcatgtgtgtaaagatatgccgactatataaaagagttatgtgcaaaagtactgatttttcatcccccttctataactttattcacctttcattagatgtgatccctgtgattaaacaccctgacaacttagagaaaaacgtatttgggcttacagttcccaagggttagaatatttgattttggaacccatggggttcattcccacttaaacttccctttaataagtttcttatttatccttccaaaatgggttatctattatttttatatttattggcattctttattttcagtttgtttacttttttctaactgaataatgtgtttgcatattatttcatatcaaaacagatcttattcttttcagtgacttagcctattctgtaaccagatgataatttaatttgcttattatttgtcatattgtcatgcacttaaatggtttatatagatggttcctcaagtgtcgtaatatgtatgtcatttttttatctgtgaaagtctatctttataatcttgtagtttcatttctttagaattaactaatcatgtgttccagtgagtacttagcaattcaaagaatattcactgtgctctttatcagtgtgatccataaaaagtaatattctatgaaacatttatatttgcatttttctgtgtgaaatgaaatgattagatagagctggctattttgtaggagcaataaattacgaaacatcactctaataacagattggaatcttaacggcatgatgcctctacgagaatccccgccggtcataaaagtgtgtcctctctactacaggactgttagtcctgacgctgcactgggaaaacggtccatattgttgaatggataattccaacgtgtgtccaaactactatataaactacattggaagtttaagacaacatatctaggtttttttgtttgtttgcttatttacttgtttatttttgtctgtgtgtgtgtgtgtgtgtgaaactgttctcattgatatcatgacccagacagaaaacaaaatatgaagttgaatgtaaactgtgggctggagagatggctcaatgtttaaaagcactgattgctgggcagtggtggtacacgcctttaatcccagcacttggaaggcagaggcaggaggatttctgagtttgaggacagtcagggctacacagaaaaacctgtctcgaaaaacaacaacaacaactaaaagcactaactgttcttctaaaggtcctgagttcaatgcccagcaatcacatggtggctcataaccatcagtaatgggatttgatgtcctcttctgatgtgtctgaagacacagctacagtgcactcacatgcataaaataaataagtctttagaaaaatgtctagaaaaagtagattttaaataaagaaaactttgaattaatagttatttttgtcattaattctggatagtgacttagttggattcattgtgaaagtgcaaaggggttcaatattggtttttttaaatgtaaaaaaagggggctggagagatggcttagtgggtaagctgactgctcttccaaagatcctgagttcatatcccagcaaccagatggtggctcacaaccacccataatgagatctgacgccctcttctggtgcatatgaagacagctacagtgtacttatttataataataagtaaatctttgggtgggggcaagcagggactcagtgaacagagagagataagtggagtgagcagggccaacccgagcaagcagaggtcctaaaaaaaaattcaattcccaacaaccacatgaaggctcacaaccatctgtacagctatagtgtatgcacattaaataaatagatagataaataaataaataaaatgtaaaaaaaataaataaaaagaaaaaaaccctcttgaggcctggtatacagttcaaagatggagtactagcttgtcaggtgtgaatccgtacatttaatttcctgctcctgaaagaaatgttcatttataataagctgtatacttgctttacctataagtacgtctcagctgccattaccatgctttacacataatgtagaagaacgttctaagtgaaatttagaattgggcaaacgctttctttacttttactaatggtaagcattggctaagagatgcatacagctatgaggatactaacatcgcttgtcttttagttcaggcttcagtcagacagtttttatcaccagtattttaacagcacaatacagagaattgcattgtgatgggtagactctaaaaaggtaaatttatgagcagttttctgacctcataaatttattgccacctggtcccttctgaggccattataattattaatggaagtattttaagcattttttaaaaagcatggtttatgtatggtagaaactaaaagttcccaatagctgaaccatatgtagttttcttggagtcagtcagtcaacggaaaggaacagaaggccgtattgaagagactcctgagtcgtggtgtgatttgtctctctcttgtcagcgtccattcatattgagtagaacattgcttagccatgaaagccaaaggtggagaaaattcactgtcttcatgggatgtactgtttgtcttcatagctgtgcggtgtacagtgacatcaaatacatttaagaataaatctcagaaacaaaagaaagaatatatgtcatatttcgaaggcttaaaagtgatgatagacctgtttaagttaattgtagagccagatgatggtgtaatgcgaatcagtgattttaaataattttaagtgcaagatggagtcttttctttcactcctaaaaagttgaagtcgtttataatgtttctcaagctcagatgtttttataataagaatattataaaagcaaggttcattttcctccagatttacattctgagttagctggtaaagagtctattaaaaatgagatgacaaattgaaaaaattgaagtcttccatttcagtcagctgttctaaaagaaaaatgcctagtgatctgggaaaataaaggaagtttaaatttgtgattgagagtaagaaatgtttctgtggttttgaaaaagaaataccagcatgtcacattaaaattatggcatctacagttctgtacagttaacagaaaaacgtattacatcagggaataggatgtgcttcagagacctcatgtagggccatgagagaaaagcaagtgccatcaccggcttgcgcattaataatccagtcagcggaagaattttcctgtctcccatgtaacataaaccagatgttccattctattaaaactccttactaatgcggatatttagatcactggtcactaggaaaaaaatgagtaatagcaatctagtacttttgccagtttgtcctgttgtgagataatgttggcagtcaggagactagaaggtttcctgccaaatacgactaaatctcatcactctgtttttatctgttgtgttttgtaaatttgatctattttcttttaaaaaaaagcaaaaaaaaaaaaaagctgttgtccacaaccaaagatttagagattggtggtctgacttcctgtttggatactacatggaaatatatttgacacttgagtgcagaagccggggtgaagttctacagcttcacgatgcctagtctaacgtggagaaggtcactgagatgtccagacttgcgtctggttagtttgagtgtgtggttttattgtggtggtggtgttttgttttatttcttttcttaaacagtatttctctgtgtatagtcctgcctgtcctggaactcgttctatagaccgagttggcttggaatttacagagatccacctccctctgcctcctgagtgctggggctggtatgtcatgtttttagtttccaagtttttaaataatatctaaaaactattttgttatacaggtttattctgggtttgtacttcatacaaaccacaatgacaattagatataaaataatcacttcattgtagaagatgtcctacgttgcctcatgctcagctctgcttttgacagctcttgctcgggttgcctgtggtgtaaggttctgcttccctttctgggacatttcttgggttaagtaagcaagtggtaaatgtctctccctagaaaaggagcaagcctagttgctatcaaacaggcgacatccctaagctctgtgttcctcacctgcaaactagacccacaatatgcaccatgcatctaaaacatatcatgtcaccacgtaggactgtaggggttgtgaactggtgcaaatatgtttttatacttttccctaattcattatttttttctttgacacagactttctagaattagtagtaggcctttttttagttaccttctgggtgaaatgcagtctgttccttcctaattttttattcatatgattttgccatttctagcgtttcgtagaatgtgtgtttctgtgtttgtctacgtgatcatgtgtgcaagtgtgtatggagatctgaggacaaccttgtgtatcattcatcaagagctggcccttgtttttccaaactggatttctcattgatttgggctccttaactcagctaggatggttagctggatggaaggctccaggcatctgctcatttctgccttcccacaccatgatgttcaatgcttttaggaaagtgcaggacctggcacttacacagtctccagttgatggtttgtttttgtttgtttgtttgtttgtttgtttgtatgtcaacatgacaaaagctggagttatctgagaagagggaaccaatttaaaaagaaaagcctcagtaagatttgcctgtggacattttcttaattagtgattgacatgagaggaaccagcccattgtgggtggtgccaccctggggtcatgggatatacaagaaagccacctgagcaagcccatggtcaagaagggaataggcactgtcctacctaacctttgtttcattcctgcccccaggtttctgccctgatcttttgttatactagagttgtaagctgtaataaacccttttgtttagagtttagacttgttttttgtttttttggtcatggtgtgttattaccacaatagaaaccctaaccaagacacacagcaaacactttgccaaccgagacatcaccaaacccctgtgtgtgattttcttttttcttcaaaccccatcatacactgaaccaaagtttcaccagagaggattcagggacaaatcaccctatgtgtgtcacatttggtgcatgtatgttccctagcagttgctaaagaagtgagtgacagtcaaggcctcacacatgctctttacacatagctcagttccaggcactggcaggttttgtcagtacattcctcacacacctccctcaaggctttacccatgggcagagggaaaggaagctggaagacactttgcttcatttctggcttcgttttattcttctcaaaattctaacctttccagtctttaccagactcccaggtcccaaaaataacaggagggttttgttgcccagcctcttggtagaccacaacccctccctacccctttatatgtgcacctgacccttgagcaggatgccactccatgaagggttggcacgagaggaacagaaagcaagctcttcctttcattttggctttctgatattacttcctcctccaaagcaacccggctcagttctctccagcctgagttcccagccctcactaactcgggatcgtgcgtgcatggtctttgaatatggcttcctgcctgtgacagaaaggtaccttacagtcatgcatttttgtcgtatgtaagtagacagagctttgctttgtttggttttacagctgagtggttttccattatcgtgatgtatagtatactgtgtctccattcactctagagtagtatttggattgtttccaatttggagcaattatggaaaaaactgctataaacatttgtttatgcatctttgtgttaacataaagttccatttcactgggagtgtgatttctgaatcaacctcggaatgtatggttgatttcattaaaatcaaaccaccttatttttttcaaaagtggtataagggtttgtttcagtcagattttggttgccatgtttatatatctgagataaacaccttgaaaggaggaagatttatttcagttcatcatttcagagcatggtcattgctctcatagttttgttctttcagtgaagctgtatgtcatgttccctgagccttattgggactggtatacatttcttttggtttttttgagacagggtttctctgtatagccctggctgtcctggaactcattttgtagaccaggctggccttgaactcagaaatccgcctgcctctgcctcccaagtgctgggattaaaggcgtgcaccaccactgcccggctacatttcttatttatagctttgctctcacccgtcctttattatcaacactcactttggaaatattaagcttctgccttctcggctattttcaagaaagaaatgcttctctcattagttctctggctgtaaacaggcatttagaaggtggttggacactctgtcagtttagctaatcagtcatagtaatttacccttagggcctatcacgtccccagttaaatgtttctccaatttgttgtttgtattgtgtgtgtgcatgtgtctctgtgtgactctgtgtttgtgcatgtgtgttaatgtgtgtgactgtgtacgtgtgtattgtgactctgtatgtttacgtatgtgattgtgtgtatgtgtatgactgtgtgtgcactcactcatgaatgtgtgtgtgtgagagagtgagagagacacagacagacagacagacagacagacacacacaccgtgtgtgttattgaactcatgtggaggtcagaggacaacgttggagtgtttctatatctggatagtcttttgctgaaccttgaagttgactgaagtgcaggcaacctcctgtctcccccccccccaagtgttagcatatcactgtcatatctgcatggtcacacacacacatgcacacacagggagtcccctctccggtgctcatgctcgtccagcaggatggtttcaggagtactttgctttaaatgtgggagaattcagtttattttctctatttatttatttcctccagggtcctgtttgctcccctggtgttatgatacatatagtagctgtatcaacttagagagggtagttcctctgactacgggcagatccacaggttcacaggatatggaagaggtcctgacaatgttatttgtgccttcaacttttttacctgtcaggtccccataataaattgcttaaatcaaatcatcccatataatggcatcttcttcttcttcttctctttttaaaagatttatttattattatatccaaatacactgtagctgtcttcagacgcaccagaagaggccttcagatctcattatggatggttgtgagccaccatgtggttgctaggatttgaactcaggaccttcggaagagcagttggtgctcttaacccaagtcatctctccagcccttcatcttcttcttaattaaagtttcagtgcttaaaacttgtctctacctttttacttaagtaacttcttacatatttattcctgttggtatactatgtaatttttgggaaaagaaaaacttactgtgttcttggagataggtccccagtgatgtgggattcagtttgatcagaaacattgcatggtcttggtggcctcttctagactttctcatattagtggctgaggacagtcacagaaatgggtgtattggaggtgaggcaggtaagctctagcctaggtattttcagggtgtataccctatcttccaaggctagctttctccattcccttgtctgtatattccattttcaggtaatgcttttaagatttatttatttatttatttatttatttatttatttatatttatgtgacatatgagagaacactgtggctgtcttcagacacaccagaagagggcattgtatcccatttcagttggttatgagccaccatgtgttttctgggaattgaacttaggaccctctggaaaagcagttggtgctcttgactgctgagccatctctccagccccgataatggttttaaaggtgttcattgataagagctatataagatggcttataccactgaagacatttctcctattaatagttacaaatgtacaaattaaaactgcagtcaggtattactacatgaatattaaatatctctaaaataaaaacttacttccaactagatccctctcaggtcggtcacgcctttaattctagtaatcagacatgtgaggcagaaagattaccatgggtttgagtgacttggatcatacagtaagttctgggccagcctgggcttcagtgtgacatcttgtctgaaaaataaatcaagcgtaagaatctttattatttattacagtaagtgctggagaggatgtagaatctctctcataaattgatggtgggaatataaaataacagaacccctctgcaaaacagtttgtttattgtacagccagacattttcaatgcaattcaccaattatgtccctggatattcatttaccatagaaatgaaatttatgttcatgtaaaaaacctgttatacaaatatttatgacatttttatttttattctcccacacactggaaacaatccagaaaaacttcaacaggtgaataaacagactgtgctagatctatacagtgcgatcctgtggagctttatagagaagacagcccggtacagactacatatcccatgaatctccacgcagagcatggaattgaagagttctagagtggcttttaaaatagtgtcttccaaatactgcagagctgggggaaattgggaaatggaatggctgactctacagaggtcaaaatatcgtgggactgaactcgtacacaaataagaatgtgtgtgaaatgcaatgagttttgtgtacatgtgtagttagtactgagatgattctgacgtcctgggctttaataatggactgtagacatggaatatataatcaccagcacaagttgagtaaaggcatttctggaacctctgcactatgtatggaacttgtggatatgaaaatattatttggcaattaactaagtcaatctaattgtatattttatatcatttaattatctacttttggctggataattccacggtacataatttttaagaagtgttttttgataagagctttaaaaacgacaaaattatttggatgaaagtatagtctgtgaattcttttccttttttcctacattttcaacctctttatagacatctatgctcatgaacaacaaacccagtggtcctgtggattgatcccaggacttcgtgtgtacttgggaagcattttcccactgaattcgtccctagccagcattctaggacttcgaagagaagtaaacttgactttgtccccacagtagctcatttatgtgatgaattgcagctgctaattccttcagcattcttcactaccaattgaaacctttgttatcaccaaattcattatcaaactttagtctcatcagcctgtgctgttccatctcttccctaactgatttctatgaattttcctaatctcattttgagcattgccttctcactgaggtgtcaaaaatcctggatgccgcttgtgtaatgaccctgtaacaagctggactcacttcatagataaacaaggtgacccaataaaggacaatctaactgcctactgaaattgtaaccctgagtgtgaaatttaaaggtaaaccctaaattctaaatgtacaaataaattaactcagcacgtgagaccacccaacctattccacgatatcccacctaaggaagaaacattccctgggctcaagatcaatggctgttcattttcttcacctagaaatcagtcactttcacgggttttgcgggcgacttcttttcctgaaaaagtgatttattaaagaagggacttctttactgtctcttccctctggaatacttctgcactgaagaaggccacgggataggagtcttgtctgcaatttcattgttagttttaaatcagttgatgaaattctcttcaattttgaagggccatttctcacctagatatcagacaacttcaagtatttgaattgatagtaatgtgttgaatttacaaattgttttttatcttgattaaaaaggagagtatgttcatttaacataattatagttttcagctctgttaataagaaaaatagccttttatgtggttgtatgaggcgaagagagaaaaaggtgggcagtaccagctacacaaatcactgagcatgtggcacacgcctgcgaccctagcgcttgggtggtagaagcagaggctgagactttgaaggctcagctacagagggattcagggtcagccgtaactgaaaagagcagtagtaatctaaaagtccaaggagtcatgtccctgtgtctgtactttccattgtttctgaggggaaactcagcaatttccttgtatttttatataaccttggatagattaagtgctatggcactccagtttctgcatacttttcatgttgctggcaatgacgcttattcgggagatgctttcctaacatgtgaagccctgagtttgatccctagcctcaaataaataatggctgcatcatacacacgtgtaatcccagcaccggggaggtggagacaaggagacgagaatttcaagattcagttgagccaggttgctcagtgtcaaaaattgtttgtttcgaagctcggtgtcctgcgtcttccccaggacccacgcggcagtggtcttttggaaattgttgtttgccttttgcacatgtatcctggagcatcctcaaacatgaacacacacacaccccaaactaggtttgatttgagaaattctactttttagttactttgaatgttactaattttaaactgttagaaaatcatcataaggcacatgtaacatttatttactctgataacgagaatgtgaataattctggaagttctaaggtacatgcctcttagtgtgtatctattatctgtgtgtaaatagttgacctactagggaatcagggtgtagtcaagaagagcatgaaagtagaaatggaaatgtggtaggaacacatgtgagactgtaggccgtccaggcgagtggaggactcggtaggagcacatgtgagactgtaggccatgcaggcgagtggaggactcggtaggagcacatgtgagactgtaggccatgcaggcgagtggaggactcggtaggagcacatgtgagactgtcaggccgtgcaggcgagtggaggactcggtaggaacacatgtgagactgtaggccgtgcaggcgagtggaggactcggtaggaacacatgtgagactgtaggccatgcaggcgagtggaggactcggtaggaacacatgtgagactgtcaggccgtgcaggcgagtggaggactcggtaggaacacatgtgagactgtaggccgtgcaggcgagtggaggacttggtaggaacacatgtgagactgtaggccgtgcaggcgagtggaggacttggtaggaacacatgtgagactgtaggccatgcaggcgaacagagggctcgttgctgcttctcagagacttgctttcagttcgtctacttttacactgtcataaatatttatatagcatgttcattgctaatctaatatttgaatgcttaaaacggctgtcagagtcatgcagagtaggcttacttaaccaatactattgcttgttcccctagatattgaatagtacaattatgcacaacatttaaatattggctcagaaatagtttaaaaaaaaaatctgagggccccaaattgaggtccaggccaggcagagctgcattatctcaaacaaagacgcatgtacagcaaacatcaatttcaggaagcacttccataaacaacttcttagtgactgtagtattcagttcattctatatctaattatctttatttctgtatagattagaggttctactgctatgttacagaccacaaccacagacaactttggaggaaatggtttattgcagcacaactcagatttcagtctttcattgaaggaagctgcggcaggatgtccaagagggaactgaagaggccatgaaggagtgcttctgctcactgtcttgtttttctgacctgcttaatctgcttcagatcgcacctagggccaacatcccagaggtggcagtgccctcctacataagtctccagtctagaaaatgtaccacaggcttgcctacagaccagggagagggggtgcattttctcagttgagattccctcttcccaaatgcctctaacctggtaatgctgacataaaaattagccaacacaatgtcacatattcagagtaaatatgtaaatacagtgtgactcatacttatcgtatgtcgctatggcattatgcagaattgaagttattttccttgatgcactgtgatggatgtatgggtgacgtaatgacttaggtttcctacacatttagattttagttttacatttctgttcccaatgatgatgtacttggtagtgtactgttcaagtgttctaataggtgtgggtatcccattcattgtgcattgccactcataagctcctcctcataaataacagttctgtgcttctatttgtatttgctttgctgcattttcttaaaagttgctttgagaattctttatctctccccatcattcaaagctctgaaattcatgactggcacgtttgactcagttgctactgaatgtatattttcatgttttaaacatgaagaataacaaaacatagacttagcaccaagtggtattactccctggtatcttttggtgcttcttcctcacctgaatgaaaggaaatagtctttaattttgtgtacatcctaaattttaagaacttgacttaatatagacatggcagacactccataatctattcaaaagttgtaattccatgtcattttctattatagatataaacaaccatgaccattgtaaatttgtagtatttttatcccctccaaaagaaatcccaaggcttaagagatgggttagtcagtaaaatctttactgtggaagcttagagacctgagttcattccctaacactgacaggaaaccaggtgctataatcccaactatgatgagggttggataggatggatccctcccagctccaggttctatgagataacctgtctccaaagataacttaaagcgtgattaatgctgacttcccgctttcacacacgtgcacacaacttgcacacgggtatagatacatatgaataggtacatgtatgtacaaaaacatgaagtcccgtacactttagctgtcactgaccacctgccttgttcttcttcgaaagtctgctacctgtgttttagagtcccctcaccaacttatacaaagaatatatctgagcttcttttttaactgtgttgggtctatagattactggggataggactgctacctttttgtattgttgctatatgtttggggtttgttagttgttggttgtttgttttgtgagaaggtatctcttactcttaggctaattctgtgtctgtaatcctagggattacaagtaaatgcacatagctcccagcttcacataatgttattgtaacagtcttcctaactgtgtatatgtgctatttttccatttttagataagcttcaatttatatcaacaatatttttaactttatagaatttaactgttgtactttaaagaggatttatttttaaatattttcatattggagctgtgataaatagaatgctttctttactcttttgttattttcttttttttgttttgttttggtggttgttgttgttgttggtgttgggttttttttgcctatttttgcacacacacaccccagctcctttgtgggttgctgctgctgcagctgtttagacaggctctttctcgtatacctgaggttggcctttaattgactatataatcaatactgaatttgaactccatatcctacctcagcttcccaagttctgggatttctgtagtacctaggtttgtgtcttaatgttcagagtgttcatttttattgaagtgagatattgtagtatgtttaaaatgattggcctgtattttgctgcttttctgaatttcttttagggtagtctttaatgtttccctatatacataaccatgttacctgttacacaacattctttttcactttccagtgtggaaatcttttaatgtcttcttttttctttatttacattttaaatgttatcccctttcccatttacccccttcccagaaacctccttacccatccacccccccacaactgcttctatgacagtgttcctccactcacacacccactcccacctccctgcccttgattccactacactggggcatctatcgagccttcattggaccaagaacatctcctaacattaatggcttagaattgaagactcagaaatgaacctacacacctatggtcacttgatttttgacaaaggagctcaaaccatccagtggaaaaaaagacagcattttaacaaatgttgctggttcaactggcagccaacatggagaaagtgcaaatcaacccattcttatctcctggtacaaagctcaagtccgagtagatcaaggacctccacataaacccagatacactgcaacttatagaggagaaaatggggaagaaccttgaacacatgggcacgggcaaaatttcctcaacagaacaccaatggcttattctctaagatccagaatcgacaaatgggacctcagaaaattgcaaaacttctttaaggcaaaggacactgtcaatagggcaaaacggcaaccaacagactgggaaaagatctttaccaatcctacatccaatagagggctaatatccagtatatacaaagaactcaagaagttagactccagagaatcaaataaccctattaaaaaatggggtaaagagctaaacaaagaattttcaactgaggaatattgaatggccaagaagcacctaaagaagtgttcaacatccttagtcatcaaggaaatgcaaattaaaacaaccctgagattccacctcataccagtcagagtggcttttttctttattgccctgacattcacatttagtataatgctgactaaggttgggtaaatatttactcttatcttgttcttcataaaagcattgagcttactattaagtatggtgatgattctggtttttacaaatgtgttagtcagattaaagaaattgccttctgttcctaggatttagagtgtttttattgtgaagcagttttgaattttaccagaggcttttttaaaacctgattttgtgtatgcattcatgcccatgtctgtctgtctgtctgtctgtctgtctgtctctccctctccctctctctctctctctctctctctctctctctctctcacttgtatatgtgtgtgcatgtgttttcttttttattgatatggcttattgcattgattgatttttcagttattttatttatttgttattttatgtgaatgaatattttgcatgcatgtatgtctgtgcaccacctgtgttactggtccctgaggaggccaaaagaagtagtcaggtccctcacactagaattgcagaaggctgtgaaccgccatcctgagcttagggtttaaatgaggtcttctggaaaagcagctgaaccacctctccagcccttgatttttaggtttgtttttaattattatttatttttattggctattttatttattttaatttcaaatgttatcccccttccaagtttcccctctaaaaacctccctccacacccgccctacctctttgagggtgctcccacacctacccacccactcctacctcagtgccccagcatttccccaccctagattcagctcttaaactagctttgcattcctctaataaattccatttcaacatgccttaattatcttcatgtgttgatgaatttgttttgttaattttttggtggtaatttttctatgttgcatataggttaaattgttctatcgtttctttttcttaatgactttttttttggtttgactctgatagcacagtgatattagcttcataaaatgtgttgatgtatccccatttctaatatttggagcagcttctgagcatttttcaatttttctttaaacatttttgaaatataacgatcaaagatatttggtccaggattttctttgttgatagttttattattattattattattattattattattatagattcaggctctttcctaatgctttattacctattttttcctgatttagtttcagtggaaactagcttatttcaatatttttatagtatttattaagccttctcatctttcatctggttctttctataatgtgtcattttctccatcttcatttaaatctttctatagcttcaaacctcaaatgcttcttattggtattatgactgattatttttatggacttatctaacttgctgaactatgtgtagagtagcataaggatccagttactgtatttatttcccgtaccttttgtgtgtatgtaggtgtttgtctgaacgtgtggtctttgtaccaccttgtgcagtgtttacagtcacctatgtatggttaaggttctcggggactagagttacagatagttgtgagccactgcatggctgctagaaaccaacttcgctcctctggaggagcagccactgattcaggccctaaccagtatttctgttttgttgttttattgccacttaaaagtttgccccacttgtgatcttacatttttcaatttaaaaaattacagcacagatagctttcaatttataatcagtttgaaagtgtttcaaatattatttcataaaacattttatgatactgggtatcacaatcttacccaaattaaacaaaatatgtctttaggaaaagaagaaattacaggccaatttatcctaaaaaaaaaaaaaaaaaagaacagaacactttttaataaaatactaacaaaaccaaaatcatcactatatgtaattaattaatggcatgcagaagtttttttcaaaggaatggaaggttagacctgaaagctggtaaaaagaatgcattgcattctaaattttactcatcgatattgaataaaattcttacattttgttatgtttctatgaagaaaaatctcttaaaaatagaacgataacactaaagctatttaaatgcaatgttagggttttgttaatgtagagaaaacaattttcattttcaaatgtttgggttatatgataatgtgtagagttctttagtgatgacatgatttttttttttcttgagctacaaaaagtcccaaagtagaaattaagtttaaatttttctaaatccttaattaattaaaaaaaaagtttcatgctgagtgtggtggccaaaggcaggtgaatctctgtgcgtgtagggcagcctggtattcattgcaagtaccaggccatccagtgctacatagtgagcccctgtcaaccaatgaagcagagacaaagaaacaaaccaaaaaaatgaatgaagcctgcggttgaacagaagctgcctataaggacagatgaaaacttggcatgtggaagaaggaagttcttgccagatgcgtgaaagtatcttcctagcagcacaggactcctttgtggttctaataagaatcatctgcatagcctcattggcaggcccagacacattcctggaggtctgtaaatgtcttatcataaacattgtacgttatctctgttaatttcaccataaatgataggaactgggatgggttttggtctagtaattaccagttgactagtaatttctaacaaactaaacagcctgggttctgtctattcatgaaaaaccaagcatggtactacatgcctgtaatcctaccacacaggaggctgtagagagaggaagattaaaactttgatgtcaaactcaggtgcataggcggaccgagtccaaaacccagatttagcctgagcattgtgtgggtgatccagtattatggaaatggaagtagcaactaaatgatctgcagaagtgatttgacctttgtacctgtctcatggctgtttttgtttggttcccgaatgtttccatagttctaaaatctcattgcatctccattgtaattgccttttttaatgtcaatgttaggaaactattgactccaaaaagctctcaaatgcagttatactggatagatgtctcatagtgtcccttgcacttggttcttgtaattattcctggagccatatgcattatgtgtattacaaccaagtaatagatttggttggttgatgtagtgttttaactttttatctacctatcagcgcttggtatttaacctagcttggatgggtcacgtcttgtgataaacctaagagttcaaaacttagcttcttgattgtcattgttgctgctcttgttttgaagcaggatatctgtggagcccatgctagcctccatctcaagagccagtagcctcagccttgttattgctgcgatcataaccatgccctgctgaactcttattttgtaaaccaccttagtaaaaagcatttgctttctccttaaatcacttctcagaattgttaacagggaatgttctgtgtttttaaagcttctccaataccggaataataatgaagttatctaaatggacagaagtaagccatattaggtaatatagaaagtgcgtacctaaccatgcaatcacggattgacataatattcataggctaagatttaattttgttttcttaagagctcctttggcattgtgtttgcatcacatcctcttcctgctttaatggttggcagatttctggaaatgttgactgtggctcccatgagctgggaacatttactgacatagtttagagaaatcgtacggaaacacatagtggggtggggcagtggctcgggtatggcagcgcatgtatggcagcgcaggcattaacagttacccggctttggtatcattcctcacttggcaacatcacacgtttcctttagtatatccccattctctgagttcacttggcagttgagtaattggttcttaccttcttggcatctttcatttcttgtttatatatttagtaatggtaggatctcttgtatgctaggcagtgccctaccacttagttgtaccactattcctttttaattttaactatacttaagactcagattttctctctcttttattttcttaagtatttgttcttaaatgctagagtgatggtttggtgcttaagagtaaaaggacacagattcagttcccagcatacagatagtcaatgccaatgggctctaatgggcttcttgaacatcaaacatggatgccgtgaacagacatacatacagggaagatatgcatacatatcagataaacaataaattgtatttattgttaagcaggaattacaggcatttgtgatatgccccaccttggtgctaataacctaatttatgtcctggagcagcaagtacttttaactgctgaaccatctctctaatctcagataacttcttttactattaggtaacacggtagagtttgaaagtaagtataaaagaggctaactagaatcataggaagggtcttcacactgtacagtaggcatgaatgggttcttctataagacacctatttactaggatgtcattttgcatcaggggaaccagaatcacttctgatcaatacatctcaaataatcttgtttcactgattaagtctcagtagttgttctctatgctagagaactctcaggctcattacacctaaccttacatttcttctatatgtctcttattcccatttaccagtgggaaattgactgtgggtaattagttaatagatttctcctattcccctaaagtctggattttctaaacaaagccatttacagctggttgtggtggcacatggaggtacaatgtgcagaagtggtagctagctgtagaaggaggataaatttgaaatcagtatagcttatacttttgttaacagtgagtatgtcacaggcctttaatctcagcacttgcggggcagaggcaggtagtctgagttgaaggccatactattcttcatagtaagttcaaggccagcatagtcttaaaaaaaataaacaacaaaaaaaaatcatgtcatttacaatgcttgggtttatataagaagaaatcccaggacattaatgctattggcctattcatacctggagacatgcagatatataatatatctaaacaccaccaccaccatcttaagatttgcttacatgttagagaaataaatcatttctttctttggagtaaaacagagcagcagaacaagatagccttccttgatgtgattcatggtgtatactggtaacatccatctcttgctgcattgccccattggggtggggatagatgtgtgagtgctttaacctcatagcctcgcttatagataaagtaagtagtagacccccatggattctgacttggccctgcaatttgtaacttctgtttgtaaatctgcatttctttctatgctttgtaccatacatagataaaataactaaacagtatgataatgactatcatttggcatagagggtaagataaatatttgctatcacatttgtatgtttctgattttgactaatgaatgtttttcctatcctggcatgttagactcaaaaactgataggcagaggaagactcacagtaaaactcttgaattcaagttttgggtgtatgcacatgtatacttatgtgtaattgataaactaataattagtgcaaaagcatccatttagttgtcctagttgtcttacctgttgctgtagtaaaatactctgaaaacatcttaaggggagaggtttacgtcacagttcagggtgtgtccaccgtggcaagggagaaaagcagcaagagcctgaatctgctgcacacactgcatccactgcagcaaacagcagtgatggacgtgtgctcctctgcgcactttctggactctaaagaccagggagtagaactggccacgctgagtggtattcattctcacagcacttaaggaaaatcaggatgatccaccacaggcacacacacatacatgttgccaatgctattctaggtttggtcaagttgacatttaaatacccatcatagtaataggtgtaatattccattatgtaatatacagaaatgttcaaaagaaattgttgtaggacattttctcaatatttaaaattgtaatgcaagtaaaatattagacttaatttataatgtgtttcatcataatttcaaaaatgcattctatatttatttcacaatggatagaatattaaaggatctctttattacttctatgtcgttgcttaatacccataagtacttatttgaacttactccttgtgtgattgtggaacatttatgggaagtccttatttgtgcattaatataggcttttaatgctgcaatttggaaacagtttatttatagttatctgtacctagttcaaaactacagttcattcattccaagggatgctgttggacatagagagattgtatgatgaggtttgtgctcagaaagctagagctaaatgttttgaaaatatagatatactttatacaaaaccacagattcctttgtcaagaatagacttgtgtaatagaaaccttttcatacacatatagtcaatatttgcttgtgataggagatggaaaactgttttaacttctctaactgccttgcttagtgtcatactgttcattacaggagcaaaatgttttccattctgcagctttttcatactaaaacaactctcaaccttcctttcaggtcatgaaacacctgagatagtcaaaagaagaataaattagtatcctggactttcaggtttctgtccaagagctggtcacacggtggctcatggtttgaacttaggaaggaaaagcaaagaggaaaggctggaaagcttagagaacaatgtgggccaccattctgttagctccagccacctcacaatagtgccaaagctgatgaccaagactttgacacatgtgctcgtgtcataaaagccttgtcctcagcctctttccttattttcttcagaatttactatgataatttattactgctcagattcctattcctctcattggagacaacttttcgatttctctttgtaagcactgagttattgagacaaatgatatatagtatgtcttcacactttgttccattcacacttggactttcttgctcctgtccagtattttagaagtagatagcttccttgctatgtgaaccttcatctgaaatttcttctcatggtataactcctctcagctttgttctctccccagcagcccctgccttgctataaatatgttcccaaatctccttaaacaagaaggcacctctcctgcatctcctcatccttctttccattcttgcggaatttcttgaaaatgtgatccacgtttcctctctaccctgctgctctcatctcttctctgaaaccacctggctggatccaccttgactattcagatgccaagactactgatccgttgtttccagtcttgccccatctgacttacctgcaacatcagtaagtgtggagcccactgccatattgaagtctcttctcttgatctcctctgtgctacctctccctctgggctttcctctttcctggctcatctctatcccttttcatggctgcccatccctgctgttccttctctgccagcttttcttttctttctctttacatcctctcccaaggtcattgcattttgaggtcttactaaaagatacccaagtttttcagctgaattctgttgcataggtggaatgccacaggtgggatttgtgatagcttctgcttccccagcagtcttgtaaaaatctaccctgggatcaccatttctaacaacccttcttgacagtcctttgtcccttgctgcagtttatccacttatgttgttgctggacacttttcctttgtatttccaataactactctgacagtcctacagtcagtgctgaaaatctcagacaaattttgttatactactctcatcagatagtatgaaggatatgctatttagactaaaagcaacctcggctgtcttttatatattgtttaatttatataaaattcattatacgtgaaatgctttgtgacagtcactacatttacagtgctgcttaaacagcactcctatgttgctctaccacactctgaactttctagtggaaacccacatgaccctgaaaatgttctttccccattctcttctcccttcagccttgacatccatactcagttttctctttctgggtatttggttattgtggatggagttatattaattcagagcttcaaatgtgttaactacctctcaatgccactgagatatactcccagcccaaactggcaagtttaaactctgtcatttgtggatttaataggaaaggacttaagatgtccataaatccactaaaagagtagggttgtttccttttcctccactgaaatgcctttgaaccttcacataggtttttgtcaaaggacatatttgcgtgcgggcctgcgtgcgtgcatgcatgcatgcgtgcatgcatgtgtgttctttttgtaagttgacttgctcattaacagtgttttaaatccagtactcaagcgtggcttttgcaatgatttacaaaccttcagagcaacagaaaaatttagttgttttatttctgtgtactctgcctgcctgtttgaactacggtaagaaatggttaaccttgggttctgtggattttatcctagatattcttaattttttggctaacatccacttattagtgagtacataccatgagttaccttgctcaggatgatattttccatttccacccatttgcctgcaaaactcatgatgtcctccttcttaatagctgagtagtattccattgtgtaaatgaaccacttttctgtattcattcttttgttatgggacatgtaggttgtttcccgcttctagctatcacagataaggccgctatgaacatagtggagtacatgtccctgtggtatggttgggcatcttttgggtatatgcccaagagtggtataactgggttttcacaatttaacattaagagtcagtctttcaaaattttaataaatgacacttttgaaccttttaatgagggagtcttcctataatatctttgaaacaccattgtgccaattgattatgattgggggtgaatttggaatatgcgtgattgagaatagattgacttcaagatagtctattgtaatttatattaaggtgttatattaaattgttagcctcagactaatgtatcaatactagtaaatagtaaaagttattaatagtttttgattatgttgtttttaacttatacatgatgaattgtttaaaagtgcatgcaaatggtatatcttataaatatgtattattctgacttcggagtatgccgatgagcatgtattatgtgttatgttcctgtgttggaaacatcagcatggcatcaggagtgatagggagactggggaggggctggtactgcacactggctttcctgttatagtattgattactgtacagttaggagtctacctaaaatcttctaactttaactgaatagtcaaaaatattcagattggggaacatctgtgtgctacaaaagcttatatgctgttacaagttactagaatgaacaggtgaattaatctaattttcaggtttaacaccaagaacataaaaatcaattggctctatggtagtattaataaaaagaaaacttatgaaattgtaagtaaactcccattaaaatagtctcaaaaggaagaaagtacttactaataaatttaccaaaagaactgtaaattttatgtgctgtggaactgaacattactgaaagatattaggtcaactcatcatttgttcgtattttaaaatattaaatttttttatgatggcaattctctcaaaccatcttctgtcaaaatcccaagtaatttcttagaagagtttgacatgctgttcctaaaatttatacctataccaagagttgtgtgtgatacagcccccccccccaaatcttgaaatagactcccacttcctgatttaccaaccactactaatgaatacattatgatattggcatcatgatagaagctctgacaagtggcttaatttgcaagtccagaaataagttgtcctacttacggcaaacttagttttgacaaaagttttatattatttactgttcttttcactttgacaagatacatgccagaaacaaaggactaagagtttgtgcgacttttctgtggcaaccatgcatgctagcagagcaggtgctgtgaagcagctttgtctctgtaggaggaacttacggctaacacttcccagatttgggtgagcaggcggcggtgccagggtagcctctccctcaaagccttggtatagcctgcattttctagtccagttctatgtaagaaaggatcccgtctcccaaagcaatgccactagctggggacatagttttcaagctcctgagtccttaggagacctgttaaaccattacaggtaccatgagataggaaaatagtttcagctactgttcctgggacagctgtctgtgaagctggagccttaagtcacctgtgcaattaactcaaaatagacgaaagacctaactctccaaagatatttagaacagctttagtttggcaaaaaaaaaaaaaagacacttaatataatgataaaaaaagaaaagaaaaagaaaacagcaaacaaaaaaagttttacgcgtgaaaggctcatcaatcaccgcctgtgcctggagtcagctttgtggtagggaattcgactaagagacaggaagctctgagttccatcaccaggagcctccccacccacacacataaagagacaaccttaaaatttaaatgttttatgtttttaattgaatatataattattagaacccggtaaaaagacaacccaattctaaaacaggcaaagatcctgactaggtttttcttgttaagaagttatagcagttagctcctagaaggaccggtagcaccacaggctatcaagggacctgatatgagctgcgataagatagatttgtgtatctgcaatcagaatgacagcgattttgaaaagcttatgcagaaacagatgcacgcatatacgctgcttgtgagaatgtttgttacaaggtatagattctctggaaaccacttaggtcgtgcttaagtgtttgaatataaagttgccaacttctctagcatcctactatgtatacacttaaaaatgaaaagttaaaaagcagaacttaaaattttaaaaaaattttacattgtatattttgaacataatttctctcccaggtgaaaattttcccctctttctctaatcaccacaatttctagtttttgttcctctcaaaacaaaacaaaaacccaccaaacctaaacactatnnnnnnnnnnnnnnnnnnnnnnnnnnnnnnnnnnnnnnnnnnnnnnnnnnnnnnnnnnnnnnnnnnnnnnnnnnnnnnnnnnnnnnnnnnnnnnnnnnnnnnnnnnnnnnnnnnnnnnnnnnnnnnnnnnnnnnnnnnnnnnnnnnnnnnnnnnnnnnnnnnnnnnnnnnnnnnnnnnnnnnnnnnnnnnnnnnnnnnnnnnnnnnnnnnnnnnnnnnnnnnnnnnnnnnnnnnnnnnnnnnnnnnnnnnnnnnnnnnnnnnnnnnnnnnnnnnnnnnnnnnnnnnnnnnnnnnnnnnnnnnnnnnnnnnnnnnnnnnnnnnnnnnnnnnnnnnnnnnnnnnnnnnnnnnnnnnnnnnnnnnnnnnnnnnnnnnnnnnnnnnnnnnnnnnnnnnnnnnnnnnnnnnnnnnnnnnnnnnnnnnnnnnnnnnnnnnnnnnnnnnnnnnnnnnnnnnnnnnnnnnnnnnnnnnnnnnnnnnnnnnnnnnnnnnnnnnnnnnnnnnnnnnccactcccctaccaaaccactcccaccttttggccctggtattcccctatactggggcatataaagtttgcaagtccagtgggcctctctttccagtgatggccgattagaccatcttttgatacatatgcagctagagtcaagagctccggggtactggttagttcataatgttgttccacctatagggttgcagatccctttagctccttgggtactttctctagctcctccattgggggccctgtgatccatccaatagctgactgtgagcatccgcttctgtgtttgctaggccccggcatagtctcacaagagacagctatatctgggtcctttcagcaaaatcttgctagtgtatgcaatggtgtcagcgtttgaaagctgattatgggatggatccctagatatggcagtctctagatggtccatcctttcgtctcagcttcaaactgtgtctctgtaactctttccatgggtgttttgttcccaattctaagaaggggcaaagtttccacactttggtctttgttcttcttgagtttcatgtgtttagcaaattgtatcttatatcttgggtatcctaagtttctgggctaatatccacttatcagtgagtacatattgtgtgagttcttttgtgattgggttacctcactcagaatgatgccctccaggtccatccatttacctaggaatttcataaattcattctttttaatagctgagtagtactctgttgtgtaaatgtaccacattttctgtatccattcctctgttgaggggcatctgggttctttccagcttctgactattataaataaagctgctatgaacatagtggagcatgtgtccttcttacctattggaacatcttctggatatatgcccaggaggggtattgcgggatcctctggtagtactatatccaattttctgaggaaccaccagactggtttccagagtggttgtacaagcttgcaatcccaccaacaatggaggagtgatcctctttctctacatctgctgtcacctgaatttttgatcttagccattctgacaggtgtgaggtggaatctcagggttgttttgatttgcatttccctgatgattaaggatgttgaacattttttcagttgcttctctgccattcggtattcctcaggtgagaattctttgttcaactctgagccccattttttaatggggttatttgattctctggagtccaccttcttgagttctttagatatattggatattagtcccctgtctgatttaggataggtaaagatcctttcccaatctgttggtggtctttttgtcttattgacggtgtcttttgccttgcagaagctttgcaactttatgaggtcccatttatcgattctcgatcttatagcacaagccattgctgttctattcaggaatttttcccctgtactgatatcttcaaggtctttccctactttctcctctataagtttcagtgtctctggttttatgtggagttccttgatccacttagatttgaccttagtacaaggagataggaatggatcaattcccattctacatgataaccaccagttgtgccagcaccatttgttgaaaatgttgtcttttttccactggatggttttacctcccttgtcaaagatcaagtgaccataggtgtggtgggttcatctctgggtcttcaattctattccattggtctacttgtctgtcgctataccagtaccatgcagtttttatcacaattgctctgtagtacagctttaggtcaggcatggtgattccaccagaagttcttttatcctggagaatggtttttgctatcctaggttttttgttattccagatgaatttgcagattgctctttctaattcattgaagaattgagtttgaattttgatggggattgcattgaatctgtagattgcttttggcaagatagccattcacagcattttataatgtctaaattttatatgatttttgcacaattctggctatttgaaatactattgaattgttcactttaaatgagcatgtaaactattgcagaaaagctgtctaacctatatatttatatgatctaatgtatatagttagattttatatttgtgtgattctttttcttaccataatacattgttcctttgtaattttttattcatttcattatgtatatcttgatgatattgcaaaatatttccttttacagtgccaccaccatctcaagtgaaaaatcttgaagtagtgagaatctcgttgtggtagatgtggcttttacatggttatcatttttaaatgaaagctccagttttattattagcaataatccttgacagtatttttttttaagtgaaaggcttacttttttctttttccaagaaaatgtctgagtctgagtaacgatcacttgcctgccagtcatgatttctagtagaagtgattttccacgttagagcagctcctcacctccaacctcatccccatgggtggttttgctcgggacgctgctgggcttcattctccgttcctgtttcccactctgaaggtgcatttgaggatcagtatttagtaaacctccatgatttttactgcctcttgcagaattaatgtcttcatgtgaatacacagttgtacagaatccctggagttgtagtgggactccatcccatcgccatcactttcctaagcaccagcgtgaatttgggctatgaaagaaagcccatgcatctacattgacaaaacgtaggcaccatctcagtagtgtgcacattgagttgcaggtggattctcctgacaagttgtctgcctgatctacagaccccccctttgagatgtactattaccctgtgggttgcttttgttccctctgacttttgtctgtctctacaaactctccaggtctcttgcagttgtatctgtataagtacccttatagttccatacatttgaaaccatctcaccattctctggatgttcacagcatcctgctcttctgttcttacagaatctttacctcacacatagaaccgacgttaaagctacactcagactttctctaccttaaagactcagccccagaacttgtggattcttcctccataaaccattttctttcctctgtttgctgccttcatggagtccatggtgggtgggatccctttcctccctatagtaccaactagccttgactgttcttcctcctctggcctttacaggtactgcatgcctatgatgcacacatgcacatacattttaaaaactatatttttcaataaaaatagacaagttcagccgggcggtggtggcgcacacctttaatcccagcacttgggagacagaggcaggtggatttctgggttcaaggccagcctggtctacagcgtgaattccaggacagccagggctacacagagaaaccctgtcttgaaaaaacaaaacaaaacaacaacaaaaaagaagtcacaataaaaaaaatagacaagttcacagggcctaatggtgattgagttattccttgcattgtccacattcttcatatctttaggatccctttgtttctcagtgactgtgacattctgcatttactcttttaatagtttaatccttctctagccttagaatagagaattgcatagatctcaatgctgttcgacagtgggagtgacaccatgcaatgtgcagtaatgtaaacatctgataattagcataatattttaatcttgtgtaataaaatcccattttagcagcagtgatagatattatccaagtaagcttctattgcctgttaaaatatttatactttctcattttttgtgtttcaagcaatattattcatcacataacaatcattttctgtgtgctgaaagctaagatacattagtaaataaaaacaaatttttaatttcctgaacctcaaattcttttaggggagaagatgatgtagtggttagagacatatatagattagaaggttgatcctgagggccagtgagatggaaggaggccacaaactttataagatgctctctgacttccacaccgttgcagtgatactaagtcaaacacacaagcgcacaccaattacattcaaaaaattattcatttattcatttatttctgtttctgtctgagagcgtgtgtgtgtgtgtgtgtgtgtgtgtgtgtgtgtgttgtgagttaagtatgaagccaggcggtcttggctccttcagagctggagttgcagccattttcaagacagccttgggtgctgagctcctgacctcagcagttgcacgtaactgatgagccgtttctcaggggtgtaaattaaagatgataaggactgggcacaaacagcagaaagaaaccatgggagtattaaatgaaaaggaacattttatagcataaatattcagatggtgtgatctgataaagagtttagcaaagtctaagtcatacacagtacttagtgactacccaatcaagggccggtgcttgctaaagaagagctggcttgcctagcttcagatcccttgcagttcagttcatttggaaccaatatcatcgttgtcttcatcatcatacagttattattactatcaacagtaagagggcttgaggctgaggcagtcctggtggcgtagagctctggaagagcctcctagacttctgcggttcttgcctcttgccaagtggcagcactgcagagcttagagcaaatgaatggaattggaagcaacgggatttggaaactgttataatggagttgacgaggtagggtagcatagatggagagtaacagtggagttaaggaagagcagtcaagatctagaaacagtttaaggataaagctcgggggcttttccgttggactagatgtgaaatgtgactaacactctcccttcctctgtaatcctatttcatgaaatagcaaaacaaatcctttcttatgtttgataagttaatattctttaaaataattccctggcatcctattacagtctgataaaatttatattcttaccataccagcaaagcccacatacttagaaccttctggggtttttttttctagctttttttcgtatttcattagctctactggttttcagttattttaatgggatatcattgtttaactttgaagaaaaagaacactgtcccttttcttggttcaggaagttccttagactcattttttgcctgatgctctctttcacatatttacatagtttatgtctaccgtactttcctgggcctgtctcttgcataagctttcgtagggttttcatacttggtatccttacacatttttgtgattgataacgtttgagttttatttcgtttgttttgcaagcatctgtgtgtatatttacttgcatgtcacagtacatgtgtggaagtcagaggacaacttgcaggaatgaatttcctccgtccatctgggtctcgggtctcagagttagctgactggtgctttacctattgagacatttctcacgtcctttggttatactgtgagataagataaggctaagttagccaggccggccttgaattggcagcaatcatggtgcctcagcctcctaataggtttggctatcaggcatgcatcaccgtgcttggcttttgcttgcttgcttgtttctttgctttgtctggtatttagaatctctatgacataggaaaaggcttcatagtgtgtgttcctatgacaacactgtgcctaagcatagaacacattctataaatgtcctcagattgaattggctgactcaattagtgaacaaatgaacaaacaatatttacattacatgctgaattgcagtccaggactctctaacttggatgtcagttcaactttgtcattttgttattttcttttcctaattagtcacttcatattagtattgtcagatggtcatgagtgacatttaccacaagaatatttgttcattcaaatcccctccattgttaatggctagagagacaaatccctaagttttagaaaataactgtccttacacggtcctgctgtgaagaatcatgtcaaaggaaatgtgaaaccgaagctttggatgtgccccatccccagcacagttgcctcttgaagctataatcccaaaggaagggaagcaaagagagaaatctacggtgcaagttcaggtttgctactataagtgttcaagaaaggacagttaccatggcaacaaatgcatgaatttcaagtggaaaattttcagcatatgtgactgataaaattgtggcatcctgattctttctagtatagggttgttccttatctgctgaaagtattctgaatacccctaatgaaattaaatttaaatccttttttcacatttctgtgtgtcttcacatttgtgccatttatgtgtggaggtgagaggacatcctgacctccatgatgcggattccagatatcaaacccagatcatcagggttggtacaaaggtactttacattctgagccattgcatcgtccctaaaattaatgtaaatttctatgacactgttttatgtgatttttttatacttaagaattatattcaagaataccctcatgaatatactgtgtctaaagtcaaatatttggatggctatctatggcaggggagatggctcagtgataacgtgattgctgtggaagtgtaaggacctgagtttgactgcccagaacctgcatgaaagcaggcagcatgcatctgtaaccctgtggagcctggggcactcggagcaagtgactcccaatggctcacttcccattttagctgaaatgtaaagctccaggactggtgagagaccctgtctcaaaggaggaaggtgacagccaatagagcaggatgcttgtcaattctagcctccacgtgtacatacatgcatagacagtctatccacacacacatgctctcacatgcatactacacagacacaatttcaaaaataaataaagattacttcactaatctatactagacacttgctaaatatgatgatcaatgctttaatgtctttggtcttcttggtcatagaaaacgacttggcactctatagattctcttgtcgtaaatgctttcccaccccagctcaggaaagctgttaagctttaagtgctctgtcatatttacagccttttatagtagaagagaacagcagtcggcaatgatgagggaaaacgatggcaggtagacttaaaacaccataaagcacaggcgattgtgtttaatgcctcgaattgaatcctttctgaatgaaatgatcagccatatgtgccactctcgtggaccctgtaagaagaggagaaatgtgccctaatgctaactgtgcatgaaattgcagtgttaggagatattgaccagatgtttcaatctcgacaaatagcttgttatgtgactgagtgaaaatatcttttgctgctttgatcacatacaccttgaaggaaggggtaatttaatagagactgtcatagttcatcgtcgtcaataaactttggcttgacctttgccttctgtttttgatgtttctgctgatcagtgttgatgagcagatgtttactgccttggggtttttgctttgtacaaaatgtgtgctaggattggtaaaggagaaggtccctctttcccccctttctccttggttacctgcgtccttggatgttgcagggcttctgggcagatccctcttagagaaatactcacttcaaaggaccacttactgccctcttaaccatctcttcatttcctgtcctagctgacatagtttccacttgccatcatcagtttttatggtgatttaccttacatcaaggctagctttctgtattctgtgtagctggaagtgatagatccctagaacagcattttgatttcctagagcatatggttaaggcctgtgatggctaaggagtgagtgacttgcacaaagtcataggtgactccctcctaggcctgttgtgcactctgggtctgatagcattccttccagggtgcttttcttctcttgaaatttgttaaacttctattctttttagttgtgtagaggggtatgcacatatgagcacaggtgcctacagaggccagtggtgtcagatcacctgcacctgcaatgacaggtagttgtgagcttggtgacgtgggtgctggacacctaacttgtgtcctctgtacaagcagtgtgtgctcctaagcaccttatctccagccccacgatgtttttcctcatgaagggtgaagattatctggactctttctaaagtcagtcatgcttgctgctatctccccctctctaagtattcacttactagcactggggaccttatgtttagtgttcgggttcagtgagctaagagaatacatgaaacaccatcatgacacacaacacatatgaagtattcaaacttcaaattttgtggacccagccattgacctgagggcctgatacaggctaagaaatggtctcccacaaaggcacagccccttccaaatactcagtaattaaactcacaattattgttgttgcatgcaattattggcaaaacatagcatttttaggaatgcctttaatatttaatttggctcaatttttcatctgaagaaaatattttaaatatataaatgaaaaaattatgggtattaataattgcatttaaattaggaaaagtatgtagtaaaattaaaattcctttaggatttaaagtattaaatgttacccagcatctgctttcatgtgaaactgcttgtgtgtcccttccgtaagaggtcccgtctagccaggacacacgcttatcatcccagttctcctaaggctaagggaggaggcattctacaagtttgaggccatccggggctatataatcagtttagggctagattgtgctacacatagggacaccctataaaatgaacaaaaaagccaatttttttctatagtataagatttagcagtgtaaagggacttaacactttcagctagcctgtggaaaatactgttctgaattctgattctaaagaaaacaatacatgccttaggcaatctatttgattcatcttaacaaaagagaacttcattatgtagcaagcaagaaagcaatgtcaaaaaatagtggtaagaatcattttgtaaatcttggtaggatagatatagaaagctatattgccctcttggtagaaatcttgacacttgaaggattctggtgaaagtgggatttattaaaacttacagctgtgtggtcctccccaccgccccagaggctattggctaccagcccacaaggacaaagggaatatagttgaggaacatggttccggtggcccgagtctgacagaaatgacagaaacccggcatgagcttcagaggcagctcagctgtggggtggatcaagggagggctatatcacttttgggaaaggggtagggatttccagggtgggtatgtagcattgtctatagcaagggtacctaagaatgcctcctttgcctggagaggcttgccaggaattctaggtgcttgctgaacaggtttttttggagaaagaaagttgaagctgtaatctcaccaaggctacctgatgttcccaggtagagggtgtgaggggttcaggctctccaggcagggtcagaaaagaggaagccctgctgggaaagggcgtcttccattttgtgccaagattagaggatctatctggacatggtagactgggactttagcacagttttcccacacagccataccatacaatgtacttttgttgttattggtttggattgggttgttttggtttttgtttttcttttttcatcattatattttgaagataaatcctggctgcctatttctgttcattcatcttttattaattcagtgaaaattccagatgatataagctattgttgacaatcataatttaggggcttattggttaagagtgctgctcattcagagttcccagcacacagatggagctgctcataagcacttgtgactcctgctccaggtgatcagatgccctcactggacctcaagagcaacctgcactctctcacataacctcagacagacacacaagtatgcacatattgaaaatatattatttacacagtgtttttaaatgagattaaatttctttcagtaaaaaaaattattttccttgatagtttttgcaatcctgtggccttgtttgttttgtttgaacagaagacatggtccttcctggtgtttctgtagtcagtctctgttccctctgtcagtgctcccccatcaatagctgttccctgtagtaatagcatgcagtctctgaacccaaagttaaatgccaagtgtctgggtaagaagtaactgagtcgctaacagtgttcaccatgcaaagctaatgacatgaattcagtttcagaacctgtttaaagatcggagataactggatgcctaatgttgtgctctgacctctgcatacatgcatgtacaaataccatgcacatccaaaatagtaacctttgaagtaaaaaagaaagaacggtgctgttaatgatgctgatagtgtaattgcaactgtagtaattataataattaaaatttgttctgtcaactttgattgccagattctatactgaaccctgaatcaacatacgtagttatattttcaatgtcttctcttgtgttctgtagcatactaaaaaagtaaaccaaaactggtctttaaaaagacagaaatatttgtgcgtgtgtgtgtgtgtgtgtgtgcatgcatgtgattatttgggtgtggctccttgagtgagcacaagccatgatataatagaaaagtcagagaataactttcagtgggcttctaatggggtttttgaaaattaagtgcacatcatcaaactggaacagtcacgttaacctgctaaattaacttcacacagtgagccatttaatcatccccagcactgtttgtttagatgaaattaaatatttttattataagacctcctctttatagttttatattaagaagtatgaaaatcctctcagaatactgggttttagctttcttggtctaccatcctctgcctcccacattcacactcttttaactctttcttttttcctttaaaagacgtgtatgccctgattcccacttaccattgaagcttaggggagcttgtccttcctgctttctaagttctacttgaggcctttgcaacaaaacagtaacagagggattaaatcaatgtgagtattgtatggcagagtagaaatgagaaccaatgcagcagttactaacagatgtgactgtttttacatgagctttgatgagacgtaagaggttgtcagaaaacaataaaggaaaaaggagtttgaaaacaaattaataaataaaaaaacttgacaagacttctctgttcatctcagtctccctcctcttcagagactgaaagtagcagatagacatttggatttggaaacgcaaaccacaggtctttcagctgagccaagaaagtgtgttgaacaggaaaattcattaagaaaaactaatttattataacaaggaatctgctgtggcattactcgatatcagcatccagagtagaccttggaaaaggtttacttaaaagaatgagatctataccagggtcccttcaacaaaatcttgctggcatatgcaatagtgtctgggtttggtggctgattatgggatggatccccgggtcgggtagtctctggataatccatcctttcatcttagctccaaactttgtctctgtaactcctttcatgggtattttgttcccttttctaagtaggaatgaagtatccacccattggtcttccctcttcttgattttcttgtgttttgcaaattgtatcttgggtgttctatgtttctgagctaatatccacttatcagtgagataagtgcatatctaatgacttcttttgtgattgggttacctcactaaggatgatatcctccagatacatccatttgtccaagaatttcataaattcattgtttttaatagctgagtagtactccattgtgtaaatgaaccacattttctgtatccattcttttgagggacatctgggttctttccagcttctggctattataaataaggctgctgtgaacatagtggagcatgtgttcttcttaccagttggaacatcttctgggtgctcagtcatctatgagatagaatacagggctcccccaatggagaaggtagagaaagcacccaaggaactgaaggggtctgcaaccctataggtggaacaacaatatgaactaaccagtacccccagagctcgtatgtctagctgcatgtgtagcagaagatggcctagtcggccatcattggtaagagaggccccttggtattgcaaactttatatgccccagtcccagggaatgccagggccaagaagcaggagtgggtgggtaagggagcaggttggtgggagggtatagggagctttcaggatagcatttgaaatgtatataaagaaaatacctaatttaaaaaaaaagaatgagatctaaaggctgggaatgcagctcagtgctgcacacactgaggaggtgtgtactctgtaatcccagcacttggaaggtggagaatctacctggccaatgtcatccttggttgcatagggagttctaggccagcttgggatacagagatacatgagtgtgggaagagaaggaaagtaggagggaaaggcaagagagaggataggaggggagtagagggaattctaaattggaacatagaacagggaaaggatcagaatggagtgctgaagctggcctatgtgctcgttaactggtggttctttaatgaggctgcttgtgttagagacctgctctgttgaggagagaacattttaggacgctccctcaatgtatagtagattgagggatatcaaagctgaatccaagggaatgcctaaaaagtatgtggttgtgtttcttctagaggatgagagttgaggggctgttaatggttgcatttacaggacatgattttgaggagctggaaatgtcctggagtttgacagtcaaaatggtcacataaccttctcatatacaggggaaacgttatagtatatataaatatgtttccattctacatgaaagaaccctgtgcactgttgggtggagcatgtctacccactgagcctccctgccaaccttgctctcagccttagctgctgttcgtcatctgaaggatacttactattattccccagttttgacattccattcctttcagctatgcttttcaattttcctgaagtgcctcctggtttttctgtcgtaaaatttcctgagtctggctcatctttcaactattctagtttctatgagtcattcttcatcatttaattatgaattaaattaaagcatatggcattatcttaaaagtgacgggctctccggcatcgtcggcagttatagttctctaaatattgcagttgggtgaagacagaattcatctgaaaggtgcagttaatattaatagaaacctttgaatgtgttgttaaagactcttaatgtgaagctcaatatgtcatttattcaggcacctacctaaggtttttttgtgaatttactatgtctggttcctctccttactcaggcatgggctttataatcacactcatttgctgagaaactgccatgttctgtattacacctacaggataatgcctaccctctgcatagtcatagttaatcgtctgccgacacctagattttgcactagatttttccttcctaaacagttgctccatcattacacttctcatattcctttagctatctttttgattagtttttgttaacatgcgtcctcgcttcccaagctgtgcccttgtaggcccactatgatcttatagcaaacttacacaacatcccctgaatgtttgtgagactgatgtgcgacctactgaactaacaaggctccttccacaggatagcttagtttttcaaggggagcacaatgacacagcaagaaccattccttcagaactttcccctttagtgttaaaccagtgcattgctttcaattccttcagaagaactttgcaaaaacaaatgtatttgtttctataattaaaaggcggtacttaacagtcaaggtgaagtgatgagtaaacgtgctggtgagcagtctaggcctcaggttgtgtgggtttgcagtgcccacgagatacctgttagaaaaattgaatttttggttggaattaggaacaccataataagattcataaaatatactgtatgctatgctatatgcctctctttgaagttcatcgccagttccaatgacacagacataacttttaaagataattgatgagatcatgtatctttggaaaccttttgttagcccctcattgcaattaatatctctcctagctgtttgtggtaatatcttggtgtttctatcattatttaagttcaattaaactaattcaggtatttataccaataatgactacattttctgttgcagctatgcctttctaattgttgcagtatccacaagattatcatatattttataattaaagaatttagactttaacagcattgatatctctcaaagtgatacacatcgtatcttttgcacatctagctccttttccatatttcattaaattatggaatcagcttcttcatccccttaggtatcctattgaggcttggttaggattgcattgaagctatgtatcattatcatgctaccatccttgggagtcataagcaaacatttattcatgtcagataggataccgaggacaaacagcagatcaaaaataacaattctatcagagtacagctagacaaaccaagagtttctagggctcacttataggagcatgggggagggttacttctggaagtgtcactaaaatgtcccatttgggtagatgacaggtgggagtgcttttggggaaagctacgtatttggagaaattaatcttccacatactctgtcctctataacagtggttctcaaccctttaatacagctcctcattttgtggcgaccccccccatcataaaattattttttgtcactacatcataactgtaattttgctagttatgaacagtatgtaaatatcttatataaaggatatctgatatgtgacccccagtgaaagggtcacgacccacatattgagaaatgctgctctagcacctccagaaactatatgcagccaaagaagatcttaaactgcagatgttcctctacttcaactgctggaattacaaacatgtgccaccatgcttactttcatatttttttattcaagagtatttacgtagattccttatgagtccttgcattactgaagtatgcatgggttctatgtagctagaattttaagggtaactataattttaactttgaaataatttttcacaacttattctcctgtattcctttcagtgcttactggtgaatgctaatttcagtgggagaagcagtcagacactcgcatcctggtagtacatatgatgtcaaggtcccatcaaggttccttctgtcagaggccctgcttattatctgagacccctgtgtgtatatctttatggttttgttttcagctgtccacagtgtatgggtactttctccacatcctcaccaatacttcctattttctcctcttttcttagtgtcatgactagtattaagtaacatctgattatgctttttttttgtttgtttcgttttgtttcattttccagatggttagtattattgagcatcttcatgtgcacattggccatttggataattagaaacacacctgttcaacacttttggccatatttcattcaggttatttgtttcattgtggtgttttagaagtttgttagttagtattctggatattaacctctcatcagatacataactgcccttttgccttattgatcactccttttgttgttcaataggtctcacttgttgttgtcatagttttttgctttatttgacttttttgtttgtttgaattccttagaaaatattgaaaaatcccatgtctggaggctttcctgtgatatttttattcttgagtttcctcttttataacttttctgtcttcacaagatatcctagagaattgtctacacacacgaatccttttcgttttgttattgttgctattgttggggagcttgtttctgaggtggggtttgaaacctttgtccatatagatgcctaagctttacccctaagctgtatcccttcgttttggtttccttgtggaatctaggctggccttgaactcatcctgtttccccagacgtaatccagctctccactctcctgctctccctccgaaggctagattggtctctttcccttcccttgctttgtgtgtggatctgggtttctgcaaacaggttcatccagtactgagtaaggcttctgtgcacagactttgttattcataacattatttcattgtaaataaagtatgaataaataattacatctgttctgttgtatgttcatcttgagaataaatctctagagagagtactccttgtcgtcaggcggtcacttctgcggtcttctgttactattttggttatctccattcctttatctctaaatgtattctgatacattatgtgtgtgtgtgtgtgtgtgtgtgtgtgtgtgtgtgtgtgtgtgtgtgtgtattcatacatactcagtgtttgtatacttatttgtttccataacatatactcagtatttcaaaatatgttttttatttattattattgatatttacatgtgtgagtgttttaccttcgtgtgtgtttgtgcaccacaaccatgtaatacccattgagatcaaaaggcattggatacattggaacttaaattatagagttgtgagctgcaatgtgggtgttgagaattgaacctgggtctgcagcgattggtcttcaccactaagctatctccccagcctcctgtgttggaactgttttttagtttatatacatagaattttttaacctctttatttgaaataaaaagatggtctctttagaatcactaataaagtatgagaagcctcagggacatgagctacattaaagagttcaaatcaacgaaacccatgcatattaaaagaaatccattatgaatcatttacaagaaaaatactaaagtttatatgaatcactttaatgacatgatgagatatttgtagttagaattttaacacgtctatctttacaaaattttaatattcatgtatgcatataatattttttgcagcaaatatcccccaattctttccatagccccaccaccactttttgctcttacttcatgtgccctctttctcatttgtctgtacatgcgtaggtgtagggccatctatctactacagcacgggcagcctcccagagagcatccccaaagaaagctgacttctccaccccagcagtgatcaactgcccgtggctcttcagatggtggagcttcttaagcccctcactcaccagcactgtgattttgtcactgttgagctcctgtgggtcttcctcactcagcaatagccatactgagtgtgtgcagcagccctgtcctatggaaatacttcctatagtcagggcttagaaatccaccctctgtccagctctgaagacttttctttcttttttggagtaggagaggggggttctttttaaaatagtctcctagaacctaagccgtttgcaagtttgaacatttaactcctggttctcctgcctccacctcccaggggttaagaattttaggcatgcaccaccatactcaggcatcattttttgtttgtttgtttttgtttttcaagacagggtttctccgtgtaggcctagctgtcctggaactcactctgtagaccaggctggcctcaaactcagaaacctgcctgcctcttcaggcaccattttaaatagtaattaagtatgagtatgttttagcataatttatgtataaattattttaagaagtataaaaattttgattactacagcttaaaagtgttgcttattgtatcttggatactatgttcagtttgaatatacactgacttattttatttcagttaatcttcaccctccctatgaagcatgtttttaatcatttccccattttacagattagaaaaggaagctgtagaaaggttaagtgatgccaagatggtggcttgtatttgtaatcccagaatttaagaggccgagacaggagcacagctgtgagctttagtttagcctgtgttctaaagtacattgatacttagctttgatatacgtataagtagccagcatttgatttaaagtccatataacttatgttctgagttctaaagacctgttatctatgactacccactgaagtggtccactctgtatctatcgctcatgtaatagaagaatgtgaacggctgttttgtcaaggtttttactctaagcggtagtgcacctgttgaggttctattcatcgtcactacaaagcacatctttcatgccagcacccgtggcagagtcctgagttctccattccgcttctgacccatccattcatttatgtttttcagtggttgattcaggagccacacaaagcagcaacattctttggatgcattgggatagataagtttggggagatcctgaagcgtaaggctgctgacgcacatgtggatgctcattactatgagcagaacgagcagccaacaggaacttgtgctgcgtgtatcactggtggcaacaggtaagtcactaccaacctggaacaccctccccacagctgtgtagacaccagcgaaatctgaattacaaacagtttggactgtttgtaacttcactttaataagcatttttaatgttcagcaaaccctgagtcattttaaccttgtgtttgattaacttttgtactatttaggaattccatgcatgtatgtaatgtgttttatacaggccactccccgattcctctccagcccctcccctcccctccccttttgcagtgagcagtatctcccttgcaagtttgcatgctccgctctgttattgctactgatgcaggagaaagcttacatgcagtttctgaaatttagatttttgaaaagtatgtgtatgaggattttgcctgtttgtgtatatgtgcaccacatatgtacctgatacccataatggtcaaaagaggatgtcagatcccttggagccagaattgtaatttgttgtaaagtattgtgtatgtgctaggaactgaaatcctagtcctgtgtaagagcgacaactgctcgtatctgttgagccttttctccagcctacacgttgttttgtaagcccatgaaaaccactcagtgccacctgcatgtacaccgaatgggagtagcgacttcgagaggcttatcacattcctgaagaagactgactctgccttccccagcagccgtcagttagcagtggcttctgagctaaggctgggactttatgagccccccccccgccccccgccagcccattcttgaactgtggctcagttgatcttgtgcaggtcacatgcatacagttataccctctgtgagttcaaatgtgtgtgtaacaactctgtcatatacaacaaatactatttttccatagacatctgctgcctctggctcttaaaatctttctacctcctctttcttgatggttcctgagcctttggcaaggtgagatgaatctatttaaactcatttatatatgtacatatattttgggaacttctacactagtaggttcccatatggctttttcaaaggtcttcactattagttatccatccctattctccctcttctactaagctctaccatcctccatcctgtttaacccttactgtttcattaatctcactcagaatgattatttccagctccgcccttttacccatgaatttcatattttttctctttctttacagctgaaaaatatagcacattttcattttccactaaccagttgatggatactaagccatttctactcactgcatcttgtcagtagatcagtagtgaacatggatgagcaagtatctatgtagtaggatatggagtcctttaggaatgtgtgtgtgtctgtgtctgtgtctggatctgtgttataggtggagcatgtggtagatctacttccagctctttgaagaccttccacactgatttccataatagctgcgccaacagtgaataagaatttccttttccccacatccacaccagcatttgtggccttgttattttgtttgctttggttttttgttgttttgttttaatctttgagttttcattggggtgggatggaattattttgtctacttttagtttttagtttatttgcaacagtgtcttaccctgcaggccagactgtcctgactcttggcagtctttccaccatcaccttccttgtattggaactacaggagtgagtgagcctttgggccagcttccttttttgttgtttttgtttatttatttatgattctcgatgatgtgtttgtatggtatgtgtgcatgctgtcgcacaagtgtggaggccagtggacagctttgtgaagaagctgtctctctcccactgcctttatgatggcttcctaggattgaagtcaggtggtcaggtttccatcatcaggggggctcctgtaactactgctctacctcccaggagcaccttttgtgtttttaagtttgtgtttagttaaacctgcttttgagttcatgaggtatgtcgaagctaaagcttgagatcatctatctagtctctaccttgaataattagacttaggaaaagaaaatgttgtgtttgggattttacatcatgtaatttgctgaactccatcagaagagaaagaatgatcttgccggcataacctgataacagagtatgagtatctgcttatagaagcgtgtgtgacacaaggcttccaccactgttaaacaacaccagtcttgtattgcaccacacaggcagcaaccaggccaagtgtctcagctcacacctcttgagttgcagcatttaagaggcagagacaggagaatcacaagcttgatacccagggtgagcttcaaaacctgcatatggagatgggagtagaggtgaagacacacagacacacacacacacacacacacacaccttctttttttttttcccaaaagtccttttattgttcaaatggcaaagtgatatcacgctgctgtaatagtaccccctgggttactgtacaaagaagatcactggtgctactattcctgaaatcgagagaaaacaaaagacattcagaaaaagagacaaacaaccagaggaggtcacagagctgcagagtgactaacctcgtcattttcacagtcaaattcgctatattaaaatgaatcagagaagccccgatgctacgtgccaggcagacatagaaagagctgaaatgactagatcttcatcttgccatgagattctttcaaaccctttctgttgcctgaatcttggacatgaaacagaaacactgtagcatggcccctagtgggaaagttacccagcatgggtcactaagcagaaaaatctatagagctggcagctggtgctgttagtcccagccctcctgtctacccagtgtactcagtagaaagttcttcatatcaatctcttatctctctcagggccttccatgtattggtttgcttaccatttggtagctgtgcctcatttctgcagtgtagatgtacatttctaacattattagcaccgtactgatgaagccttccttcttctttgaatgggaaaaagaaaatcaccatttttttttttttactattttattagaatcctcagaaattatttactttaaattttagttcactaccatatttgcattctttgtacttgctttagtttgtttgatttttttttttttaagacagggcctgcagattcaatcctggttagccttgaatttgctacatggatcaaaccaacatcaaacttgtgcctgtccttatacttctgcttcccagtgtcacggttataggtggaccatgcatggctgggtcccctatacttatacatatgtaatttgtgcttcatccttcgtgctgtttttctatcctgacccatccccctgttgtaagtttgttcagtttagcataagatagagtcagttggtatgaagggaacctcaattgagaaactgcctccttcagactaccctatagacctgttcatgggacattttcttgattaatgattcatgtgagtggacccagccaacagtgagtagtggccctgagttgtatagaaatctagctttcagaagcagtctagtaagcagggttcctccacagcctctgcttcagttcctgcctccaggttcctgcttgtgtttctggcctatcttccctcagtggtggaaggtcacctggaagtgtaagccacataagccctttcccctccaagtttttcttggttttgatgtttatcacagcaaatagaaagttaggacaattccctctctcaccttctttattttggcttctagcagaatcatagtaagacctgacatgattctgggtgctgaggaccattgtggacaatagttaaaaatagcgttcgaaaatacgtaggggaacaaagtaaattttaaatctttgctttaatgtggtttggttgtggtggtggtggtgttcgtggttgtgtgtgtttgtttgtgtgtgtgtgaaagagagagagattgattaggggatagttttcatttctcaattaattattcatcatacaaaccaaggtctctctatattcactatccactactcagatgtacgtgtttagagctttgcctcttgcaactttcctaaaagaaattttaattttcaagtgtgattttttttcccattaataataaatgggtcaagttttctttctgacatcacaaagactagaataaaattgttaaattgtcattatatactaaattggtgcttgaactattattaggttctacagatgtcaaagactcaatttgcccacgagtattatggctttgatagcctgtgatgttcagatggtattgggactggggatttaggacagttggtggagcaccaccctggtgtacactatcatggcttctgctcctagcactgcgtaacatgatgtggtaacccatatccattgtcctagcaccctacccaggaagtagaacagaaggatgtgaggtttaattccatccttggtgcatgcagattcagcctgggaactcagaaatctgcctgcctctgcctcccgagtgctgggattaaaggcgtgcgccaccacacccggcttatttttatttcaatataaacaaattccaaattcagaaataaattaagataaggatgagtggaaaattgttttggaagagaaacttttctcttagctggaggaactaaataccccaggtctcaaatgatgacatcatttcctgtagcacataattcttactattttaatttttagtaatagtgaaaaatgctaaataattttataaatctagtcagaatgaaggaagatttatatttacgtgaaatgtaaatattttacttcattaagttgaattgttgggttaaaattaagcaatttcagtggcacttaatagccagattttaaatctagtatgctggttaaattttccagctataaaatcaccccacccaggagttttcaactatagaaacttgtcctaattgattccagtccttaacatgtaatagttgcaaatttatttctcacagcaatatgatctacgtttatatgtatattttatgaaattaatcccatattgggctcttaaagacatttaattagtcaattatagttcattggtcatattttaatagaaattttttaccataaaaatgaaattttggtttatgtagatttcctatttcagaatgacctagccccctatttattagctgcattttgaactgtatttatatattaaaaccttattttggagtttaaaaactcctatactggccttgtaatttgaggtattgctggttactatgtcttttgtcttaagggcatcaaacatgtccccttcttcaccatcagcaatatcagcttttgaagaatttgttcctttctgtataaaatacctgaggtctttcatcctttataagtaccatacatttccttttcttgggtttttaggtccctcgttgctaaccttgctgccgccaattgttacaagaaagagaagcaccttgacctggagcggaactgggtgttggtagagaaagccagagtttactacatagctgtaagtgccgctcatgtgtagagtccatgttaacatgatagactatagctgttgctgatatgtgttcattttttaaagccctgtacgtaacccaatgtgcctttcttgagcacgtgattgattcattaatataattatgcaatagaaatataatcattatgggtatgaatttgtgttaccaccttcgggtctactgcttttagaaatattataaataacttctcagtctcacagaattttctgctgttaagtcctgttcataaggtcttttgaaatagttttacaaacattttttggcaatttattataaatgatatgagcactgtataaagccatagtaatggaagtatgtattgctaacagtttgagcttattttcttaaaaagaatcatgattgctatttattccatagtaattagcatgacaccttttagtttaatatttcagaaacattgattgtgacaaatctcttaaatgtaaaatagggcagcatataatttgaattaagttctctgacataaaaataattggttaagaattaattttctaatgttggaagtacactaaaatttctcttgaattaatcaacccatgcttacctagttgtaatctgagttaaacatggctgctcacgcaagagtataacctgttacttggtagtgggatctcatgtcatgcacagcttggaagaacagctgctagccttctactctctgagctgtctgaaacagctgggaaggcgtgtttgaaatccgttatcttgtaaatatgtgtttattgaagatataattatttatttcagtctagtgtcagtgtcccccacggcacgtttatgtgcattgctgtaggttttacagtgtgctatttaaattcttaaatgggattatatagtagaaagtcatactacatcttcagccaatatgtgagaaaaccattgctagaattcaagactttctttcattattatttcactttattctgtttctttaaatgatttaatttgtctttaggtcctgttattgtatgtttttctagtgtggttatttgtttgagacagaatctcagtatgtagcccaagctggctgcaaattactctgtatttcacagtatctactagtgtcaagtagaaacttcacctgcttggacgcataatgacttgatgagcttgtgagtggagtgtaaggcttatacagtggactgcacctacagtctcagtgaatgctgggactgttgcagaaagactgaagacccagcttgcaaacagctcattactgctttgatttacttggttttaatcaatctgtggctcttagtgttgcttttatgtttgaaagtccttttcatttccagatagatcttttgctcttatattgatttatttcagaaaggaggatatgtattcatctgtctgtctgtctgtctgtctgtctttttgtctgtcaatccatcctcctttcttccctcccttcccttttactcacttgcttttgatgcagtatgactttgtgacccaaggtgggctgaaattcagaagatagccagacttctccttgaactcaatgtgatcctcttgcttcagtctcctaaacagtggcattacagctgagagccaaggtgcccgctatctgtttggtttttgttttgttttgttttgttttgttttgttttgttttgttttgtttgagacagggtttctctgtatagccctggctgtcctggaactcactctgtagaccaggctggcctcgaactcagaaatcttcctgcctctgcctcccaagtgctgggatcaaagacatacgccaccacacccagctctttttctttttctctgctctgctctgctctgctctgctctgctctgctctgctctgctctgctctgctcttcttttcttttcttttctttttttcctgtttggttaagtagccctctaactttctgtatagctgagagctggtgtttcactcctgcttactgtagtggggattatatgtgtgtacaccatgnnnnnnnnnnnnnnnnnnnnnnnnnnnnnnnnnnnnnnnnnnnnnnnnnnnnnnnnnnnnnnnnnnnnnnnnnnnnnnnnnnnnnnnnnnnnnnnnnnnnnnnnnnnnnnnnnnnnnnnnnnnnnnnnnnnnnnnnnnnnnnnnnnnnnnnnnnnnnnnnnnnnnnnnnnnnnnnnnnnnnnnnnnnnnnnnnnnnnnnnnnnnnnnnnnnnnnnnnnnnnnnnnnnnnnnnnnnnnnnnnntcgggtcttattttggtccaacttgacattatctacctttgaattggaacctatatgccatttctattgtatgtgaatattgatatgattcagtttaaatttgtctttttatttattcttgttatcctttattatttttttacttctcctatccttttatgataatttagtacttttatctccattgtgttctgtctgggtcttactctgtttcttcctctccctgttgttttggagtgtaattgcacacctcactcactcggcaggttttgtttttacatgacatgataggacttcctacagtgtgagagccttgatactatatttcccatttgtctcatctagtctctatgtatgtagccactgattatttaaatttggggtaattttaattgttttgttttttatataggttttgaagtatgtaatccataaaacatacaatacacattttacttacatatttacaaacactatcctatcttgtataattataatagtataattatgttatttttaaaaataatcaaataatgagaaataaaccatactttttttttttaaatatagctgccattccagtgttctttgtttcttttccttaggatcaggttcccatccaacatcattcccttcttcctgcgagctcattcctgaacagtccttgtactcagatgtactagtcataaatgcttttagttttcaggtttgaaaacatctttgttttatatttagatgtgagtagcatttttgccacacttgtttttgccctgccaatttcatttttctgtcattctatgaatgctgctgcccactctcttcttctagaattattcttgatgagacaggggctgtccttgctttggttgctccatgtgaagcatcgcccacctcccctctacccctttctctgatgctttttcgtctgctactcgtctggctggttttattatgatatcttagtatccctcgtgtgtcttggcttgaagtttgcttaaggtccttgagctccaacattggaatctgtatcatctgggggtttcagccgtcggctcttcggattttcttttctgccttcataccattgttacatatagttcactcctgttccttgtttctttgaatttctttttctctttgtcttttactttagctactttgtgtggtacctccctgttcactagcattttcttttggagtatctaaactctcattaatttatctaagcattttaaatctcaatgttgttttcatatcagaaaactgagttgagacttacaactatagcttgtctctgcctaacttttagaatatatagacagtaggtcaggaaccctttgatggttgctaatcagatattatctctataatttataacagtagcaaaattatagttacaaagtagtaacaaaggtaattttatacctcaaagggggggggggggttaaaacaacatgaactgtattaaaggggcacagcaataggaaagttgaagaccacagatatatagttaaagtaacttttatgacattctctgttaacttcagcacatacatcatctctcgggcagttttggtgctttaccactccttatgaatagttgtatttgtctgtgtcacatctgtgtactaactgttacctatctgtacttttattgtaaatctcaacagttattctgggatacagttatttgtaataggtattgtgctttggaatcttgttcttatgattttttttttaggtctatccaaagtagtacctattcatgacattggttcttcaccagtggcaatttttctcacttggagacgtttgataacagctgaagcaacctttttgtattatgatgaccaggtggttcctacagaataggggagtttacttaccatcttataatcatgagatagcatgccacaatatgttccatttaaaaacaaaaaacaatgatttcagtgtttagaaaactttttggggctggggagatggcttggcaattaagatcactggctgcaacgccagaggtcctgagttcaattcccagccaccacattgctcacaaccatctatatttatagtcccagggtatcagataccctcttcttgtgtgcatacatacaaggagacagaacacccaaatatataaataatttttaaaagaaacttgtagcactatttagctgattgttagagcacattgctacacatacagaaagatataagttcagtccctagaacacaaaaacaattgtccaaaaagctactctgtctagttctagatttttctatggagcatctctgcctttctgatactctggtttgtcattttactgtttggttttgtgtcaacttgatacaaaatggagttatcacagagaaaggagcttcaggtgagtaaatgcctccatgaaatccagctgtaaggcattttctcaattagtggtcaaggggagagggccccttgtaagtggtaccatttctgggctggtagtcttggtctctacaaaaaagcaagctgagcaagccaggggaagcaatccagtaagtaacatccctccatggcctctgcatcagctcctgcttcccgacctgcttgagtaccagtcctgacttcctttggtgatgaacaacaacatggacgtgtaagctgaataaaccctttcctccccaccttgcttcttggtcatgatgtttgtgcaggaacagaaaccctgactaagacagtcatctataatttatgggttctcagactaccagctgttttttttttctctagttttgttgattgagattggggttgaaggtgtttagttgttccctgttttttgctttgtttcaatagtgccgatgttggtagtaatagtggcaggaggggggagggggggagacacagaatcctacaaagcaaggtgggctttgaacttgaagttattatgcttgtttacatgccttctctactacttcagctgtctcattgttttgttatttttctgcagagagccctacattggttctgggtttgtttgttttttctttctctttttatgatttgattttcctgcaagattacctagatatttttcctctgactttgacctgttaataactgaagcatgcatcatctccatattcactctgtactgactttttctggaatgcggtatttgtcttcagatgcagatttatattctgttggttctttccttttcattatctctagactgtttttctttttctttcacctgtgaaaggtcccagaaaaggataaaaccaccaccaatatatcagacacagtcttctgttggagacagaactgaaaatatgtgattagaaaatagcctttggtttatgctgaggtggtttcagtctctatactcctgccacaatattctagatcctttttaaactcctttataattttaaaataaatctgaaatctcttcactgagattattgtgcatatacacataattactaatgtcatgcttttgtaatacttttattgctttaattccactgacagtacagtatgattttattgagaaatctgtgcattatttctattaaactgtctttctggagaagttttcaagtttaaaatatactgtaaagaactaatcagaggactggatagacggctcactcttagaaacacttcctcatgtgcgggactcaagtttagtttccagctcctacaaggctgctcatgactatcttcattctagttccctggcctctggtgtctccaaaggcattgcacccctgtggtgcccacttgtactttcagacaaaacactcatagagagttttatacttaagggacaaccagtgcagtggtggatatttataagtcagccaatcaaattttgaggcaggagattcacaagttcaagactagagtgggcaacatggtgacattctgtctgtaagtaagtaggttgatttttgtttggcttgtctttaaagaaagtctttgatattaaaaagatatttacagtagctggagataccataattggtagaatgcttgtctaccagcacaaatgtagctgtgctcacttacagatatgtcagaagttcacagtcatctgtgactacgtagtgagtttgaggccattctggaatacagaagacagggtccataatttggtctgccaacattggataaagagaatatatatgtaatgaaatggatagttgctgtttttaaggacttaacgttttgcagtgtgttctgagatgtatttaagctgatgcatgattataaaagcagccatccttttgattatgttccagcttaaagtatgttacctggtactctttttattgcagtaagcaattggatctgtcctgtcataattaagagaaactgagaagtgtaaagagataaatttaacataaatagtagctaatatttattgagatttgcttccttctcttcaaaatctagcaaagctttactaatttatagacttatttcaatttattgctttagccttgttagaccataaaaaagttttaatactaccttttaaaaactatactcatgataatatatgttagcagaaaaggtgaactaatggatcttttcttaaaacttaagatatcctgtggaagataattgattaagtaataggtcatacttctctataaaatgcttaaatagaattcaaagtgcttcttgaaatttagtaattaatctttgcaatattcttctgagattattaaaaagttgggacagttgaactacacttgaccttttatccaaaatgtcagtttttgtgttaaaattccattgtcttggtcaaataggtgtttactctatagattcattcctggtttttgttatttatttttttaactctatttttttttttcccaagtgccctagtctggactgctttttgcctttttagggcttacctgatcatattgagcctttatctgacaatggccttacatgtaaccttaaggtgcactgcatttaaaaaattagactagtaagtcaggcataaaggtgtacacctataatccttggcctctggagtctgagctgtgttggtctattgttttatcaacttgacacaggtagaataatctagtaagaggggactttctccagtagatttgcctgagggcaagtctgtagaatagttttgattgtttgatatacgagggtccagcctactgtgggcaacaccagccttgaggagagagagagagagagagagagagagagagagagagagagagagagagagagagagaagccaggtgagcagtagataacaaggtggacaagcaaccttccccattcgtctctgctttagctcctgcctctgggcttctacttgggttcctatcgtgacttccctctataatggatggtggtgtggacttgtaagccaaatacaccttttcctcctccccaagctgcttttgctcatgctctttatcacaaaaatagaaaccaaactaagacaaaaaatcacatgaactcaggttgccaagaggccaacctgagcaacacaggttcttgtatcccaaataaaaagtgagtatatgagtaaaacactgaaatgaaaaagaatgggttgtttgtttgactagagcttttcatgttagtgtatatcttaacaatacaaatgcatctctgccatacaggtgtgtacaattgtatgtgccaaattggtctctctttaagtaatggcccaaacagtgaagtgtagcatagtagatagtgtgaaaaactcagttatttctcttctcagtcatacacacacacacacacacacatacgcgcgcgttcacacaaacacacttagagacaaggtcttacttgtagcccaggttcatctcagacttgaagccattctcctgtctcggcctctccagtgctgggattctaggcatataccaccagagtcagcagtcattctttaattgtcatagtttcttgggaatattttcagcaagttaaatcccccacccctcccctgaggatgaccttgaactttgaatcctcctgcctctacctcccatctgctgggcttgtaagcttataccaccatgaccagtttatgacaggttgggaaccaaatcaatgacttaatgagtacaatgcaaatctctctaccaattgagcgagagccacaacctctcagccatctaaatcccatccatataatttttttagagaaatacctggtgatctctttaatagatatagattttctagttagataaaattttcatgctaccacaaagaaaaagaaatctctgctagtatcaatgtcaatattcaactaacagaataatctttttacctatttaaaagaaataaggtagtcttggttgtaaaagcatagactctaaaaataggctggaatcgcttctcggccttttggctaagatcaagtgtaaaaataggctggaagctttggatttgtggacttactgcaatacattgagagtttagaatttcttgtgaaattggatatcatgctgtatcctggtcacatttgtaagaaaataagcatatgtgtacacataacacactaaattaattagtaaatcatcgactcaagtatatttgcttctatttactttcagtattatagagcagcaagcaataaatagcttgagaatattaactttacagaatataataaatatgaacaagagagaaaatatataaacattatgacaatagtgtatatttgctgaagtatttgtttgtctttggaaaggtatagaaattgaacaaaaaaaaatagccctgaatattgacagactttatcccaccatatttactgatcatattataaaatttttatagttcagtatgatttaatcaataacttgtgttgtatctgtccaccagacaagtgggattgaatcaattttaacagctttattgcagtatatccatgctgttgtgtccaccatttaatatacacagttcagtggatgtttgtgcatttatagaattctgcagccgtcatcataatctaattgtagaacatttatatcatcactaagagacatcttgtgtccattagcactgcccctggagttcatcttctgctcacttgcttctctcagtatagcattcgagtgtcatactacaagaactttcaatgtttctagtcagacagctaggatgcttttctttgtttgttggcaaatataatgggagtggtatgtatatttttgtcctttgttcttgcctatttttctactgcaggtcttcaagagaagatcttttggcttccattctaatttatttcttcagtgtatgcatgttttagagttggttcttaaaatgccagtttttttctgatttgtgtaaaaatgcaataaatgggatttcagggggtggtttttgtatttggggggtaggatggtgcaaagtgaccccccccccttttccttccagtctttaccctgggagacctgttttcacatgtatttatatatcccatcaattattctcagaacaacttgggtatctcgtctgtgtagagagttatcctctgagcccaggagcttgactgcaccattgtgtttcattgtttggcctccttgcttacagatccttaaagctctagagtttaacttactcataatctccttttcactaatattgctctactgtcactaaagttatcgacaattctaaatcattgaagatttctgaaagacaggaggcttctcttccaacttctgctcttcttgtcttgtaccagtgcttctgacaaccacccttgactgcttttctctatgactccacttctcctataccacctgattcccacattacactccacccagcctcctcgtcagcctttaaatgacttcatcttttaaagtattaacttctgttttaattaactctgtgaagaatccagcccatttttaaatgataagtcagaatttgcagttaaatatcaaggagaataatcctccaatgattttagttatatttttcagactgatatatatatattcaaggtagcaaacaccatatagccctctttaaggcctcagatatgtttttcacattttgtgtggcttctaggtttagtgtgtctttaatttggaatacgtaataagctaaatatagacttttaaatgttttacctgtaaacatcaaccagctttactgcagtccgcagatattttgatatggttgtatagtaattatcaatattttctaaaactgatgggcgattgtgtttcctttgttaagtcaaccaagaattatattttgtaaaaatatactattggctcagactcagttgaaacaatgtggcttattatcaacaataagcagattctttaaagtcaaatgccttatttattcactttttaaaggcatgtacatatttttactcttggatataatcagtggctttttaatgcttagtgctctgctaaagagcttctgtaatttcattttatttcatctgtcaaggttagtgatcgtgatggttttaaggtaccctctagccttttccctccctcagctgagctgaattgcgactactttgtagtaagtttgttacacagtctgtagacactggtgagaatcagtatggccactggcttattagtttcacagatgcttccataatacttagtgcactcttgggtatattaaattatcatatcgtgacagcagtcctgaaacatgccagtcttataaagccgcatttctgagagttagagccaggcttcagtgaaccatagctgacatgccatgttaatttccataactatcattaccaggggtggcagtatttcgaagacatgaaaaatcttaataaatctacccagttaaaaaaaaaaatcacattatgttaccttatcacagggtttctaatcacaaggtctgattttcttcagtcccaattgaatcgtttcacaagtaatgataagcatctttactcttatcatgggttattaaatatttacttaagtgtacaatataccaaaacacaatattttgaatgttcagttttctcagtatgtactgttcacgctgtgaatgaaaacctcttaccatcccatacagcatatttacatatacaaatgattttgccttaagtaggaaagacacagctgacagatacataggttaatttgctctcttaaattgcagcaaactgttctgtgattcttttgtgtgtttggggccatgttgtagagaaagaaatcatcaagcaacattttaaggacattggccttttgtatctaatccttaataaacttatatacctcaaaatagaatatttctttgcaaattcttaccttcaaattattaataatggaaggaatgcatttttttaatcctgtagccccctcccccagcacagcttttagattgtagataaacttcccagctcagtaattaactgagctcagtcctcgcaccctgtatcatgtgatttttttttccagtggaatacattattagagcacttacacagccagtctagctgcagcagcccaggcggcaacagcagtgccatttttcacaaagaaaatgttgaacaggagccaagtgtttggtggcagtctgttgctaggaaatcaaggtcctgaggcgattagtgacaaagcaagcaataacaagaaggcagaattacagatctaaaagagaaaaaagtggttggtgttataattacccaaagaaatctgcactcattaaattggctgtttttatgattgactttaattggaggttagctcggatatttagctcctttcccacccctttaaacacacacaggcacataatctgtagaactgcagacttgtttttctaagcattgagaggagcttgccctgtaatttgatccccactgacagatgcattttctatgctgccattttgaattaacctattgtagaacaattttcttcagccctgttgaataaaacatccagtctgattacctccgacggatccgatagagtaaaagaatgtacctcgcactgaagtagattgtttgcgtggactctgctgattttgaactctgccaataagcacaatcatttgtaataaattttcaaagaaatttctggtgaaaaggtaatgagagtcacccttttataatttaatgttttgtaccctgcagcaaaataatattattcttgtaaagcagtgttttatttctagcatgcttcatgtgagttcagggaaaaaaatcttttatatttaatattttaagaatataattttatttttatatactctaaaatgaccacccttcctcccccacaagcaatattttaatatttaggttcaacataattcaaagcactttatttcgagaaataatttttatacatattatgcttaaccatagtaatttttaaattgacaaatttcatcctttgtgatactatccttgaaagcctttatttaaattgtctagcatttgatagcgcacattactaagaaggcacctaatcagtttgccaggtgtagcaacagaggaagacgacgcagaacttatttacttctgagaagcctgaagaataaagtcccagtgctctgcaggcttctaatccaaccctggaacagaagagccaagcacattctgtctgacaatgcacacgctgctaatcagacgccagtgccaagctgtctgctttgttaaatactcagcttcctagaggcaggaagacagctgctataaggatgatgaaatttggtagttcaatctatttttgctacccttgggctaccaagatattgttaatttagaccaccccaattggtacactttagggagttttttaaagagtttgtaattaaaatgataaaacatcattattacattgaagaccttctgtaagttttacatttggcagatacctactgagataaccccagcatgtaatttacaatgatgtaatggctgtaattgcattgtgggaaaaagaggagagaagagaggagaggagaggagaggagaggagaggagaggagaggagaggagaggagaggagaggagaggagaggggggaagagagatcactagctaggcataggaggtgagtgctaacattagaagagttctgagatttgcttctatttcatttaaatctactttatccccaaattgcctcccaatatttgaatgtagtggctgtaaaccttgcagcatggtttgttgtttttgttttttaaatagatacgaacctagatactaccaccagggggagaagctaaaaacctgaaagtcctcagctgattatgatactggctgattatgatagaggattatacctcttagaggcacataattaatcacatcacccaaatgattctgcctttgggacatgactctgagattttctgtgaagcacataaacttaacacactactaaatgtaaataaaacgacaactgtgtgcactggtcatgtatggaaagggtgcgggcggtagtgcaagccggcagcatgaatgctgtgccttgtatctgtcagtctagttgaggaactgtccttcagacactgagtacacaagatgtgtgaaaatgagctgctgctattgggactcatctgttaggaactaatgtccacaaaatcactggagccgagttgagtagtgtctaaggtggttgtctattttttgtcaccatagtatggtttcatttttagtattccctctaaaaaacaaaaaaaataatctaatccctgatttttttttaaagcaaagtttgtggtttttgccctggaaaaagtagttgcaaaaacctagttgctggtgttgggatccaactctactgctgctcaacaatgtcgaaattgttgtcctgctgcggggaatggaagatcactgaagagcagcggctaactccgggttttctgtgcctgtccttgcacctgagactacacacttatttttataaaccctaaatgctaattagctttttaaacagtaattttcctctgtctaccacataaggaatatctatcttagaattttaagttttactcagcagagagtctttttgtattttgtttgtttgttttttgagcatgtatagcagaactttattttcttttactttttttttaatttataaatcccatttatttctcacacaatagtaagggatacacattttcattagcctaaactaaaaagaaatttctactctttagtaaatgacggacccccatttacctttatatgattgaaagtcagaactgtgatgaactacaacacagtaccatgtggtcttattggtttggtaaataaactactctaatttaaatcttaaaagaaaaacaatgcttatccatttcattgtttgctttgcttttctttctttttttaattagatattttctttatatacatttcaaatgctatcccgaaggttccctataccctccccctgccctgcttccctaaccccaatcccacttgttgaccctggcattcccctgtactggggcatataaagtttgcaatacccagtgggaagagaggccccttggtatttttgtaagtgacaaataatagaaatggtttgactgtggcaggcagccattaacgggaggacactgttctgggtggtgctgtgtaagtaggcacatgatttactggagttgctagagctgcacacagggacctgaaatctgatgtgtgcatctcggggtagcctacagatgatattgaacatatctaattacattgcacatgtgtgacatagtctcattcaagagtggcagaaaaggagctagcctaagtaatttttaaaaagagaagaaaagagaaaagaaaagaaaagaaaagaaagtgtttgcactagaaaaaagctaaattttaaaaaagaataatctataaacactgtgttctagttagtaaacttgtttccttttgagttggaaattcataattcttaacctactctgggtgtgtgctggggtgaagtaaatggatgttggaaggtgaaagccaaatttcttgctgttataaaaggactgtaaatcacagataaatatgtgcatgggataactaggatgatccataggatatgaacccatgcttcctttaatgtgtgaagatgggtaaacagaaaaacttagaaatgtgcctgcacgtgggttagtgagcatacgtatgtttcctattcatgtccctttgggaggccctggaaacagcggttctctggtgccaacaaccaatccaatactcagatctacttttataaacctcagtatccaatgaaagggtctagaactacttggaaaaatagctggtttggggttctgctaaggaaaatacaagagatgcatgagggtcttgtatttgccaaccagagggaatgattggtaaaagtagaagaagccagcctgccattggtgaggtcaaagttgccggttatgggcttttgacgtgaggaggaggcagaaacttggcttctttgatgttcttcttccagcctcctgtttgagcaaaatctcagacaagttcagactggtggacatttgagatatgtaaattcttgacattaaatagtagcaatgcagcaacattggtacctgtaacaggggacatgtacagcgatactcaactgggtctgattgtacacagtgctgtcctgaatcacacagcatcatcactcaaatgaagtattagtcagtatattttaatctctctgtacccttcgtcatactatgtatccctccaggccaaaggtaaacattatcctgaatgttgtggttattaccctgggctttattttatatatgtgtaaccttacctgcttgtgtgtccctaattgttctaccactcttggccatttttgttatgttctgaatagtttctttttatctactttttattgttgcaattttgtctttagtaatttctgttcttaaactatctattcagtttttatatctgttgctttcatttcttactatcacaatggtttcttgttctttatgctaaactctcatttcttattttaaagtcctctcttttgcttccttaattaagcttatttccaactagcttaatatttagaacttccgtttcttattttgctaattttctgcttccatttatttgagctgccttattttccaaggtgttgactagtattcattatttgtggtaacttctcatgcttcaatgaagatgtatttctaaagagaaggtttttgtatttgaatcttgcaaaaaaaaaccaaaaaaacctggggtaccatcaacttggagacatatgctaatatattctgggcataaagatttgtgggtttcatgtgtaacataagttccagattcataaattccatgagagtagatttgtagttaacatttcagagaaaaatatccctcttcccaacatggaggttaaaactggctaatcatctttggtcactctttctgtggggtgggcctaattctgttttattcttgcactaagcatgtaacctgctctgtcccatgtttatgtgggacatgaaatggggatatcttcagtggaggaatcctcatctttagttcacctggagtttatctcctttgccttgggctcaatgatatggtggtgaacactttcaatcggccagtgggtgtcaagccttaacctcacaagtgttcagcttaccattgtggctgatgtcagactatttgaagtcacggagtttcaccttggaagagttgagtgagtacagttgcagctcccttctgtgtctggctctccgctgacagtttgtgcacgtctgtgagggctacaggtgagctgacaaggttcggcttcccccagtgagagacgcttgcgtgtgtttccttactgcatacctttctatttttactttgtttaccttctgaatataatctattacccagcaatatattctgaagaaagactctgtctccctattgctgaacgtcatcttttcttgttttgatcaacaagactgtgtcagagcaccaagtcaactgtattgctggaaatagaagttcttcttgttcactaatatactgggattttgttttggttttgattttgtttttgagtaacagaaaatgcgtgaaatgttagttaaccagaatcttcaccacacatctttattttataataggtattttcatgtaattgatcccattctactagtatcccatatggtgttatttctactaatgaatgtttactgtgtccttgtacaatatctctacccaagtatttatgagtattaatgtaaaactctcttaacatgggtaatatcacatagccaaaaaatcctatccttatgacatttaaatgtaatcctacctcatatattcattgtagcattagcaggaaatgcaaaacattgggaacttcttaaaagatcagtcatagaagagtatatgatagagcttttacaccatgctgcactgtatttatgaaatctttttaccagtagtgatcccagaaaagattctttaagctgaaagaataatacagggtgcttcctcttgtgtaggcaagagaaagcacaaagcccaggaaactaacgtaagcagaagggcgggaaagccagaggctgttaatgacatgggcgtggagcatggggtacagttctcatttctgaatgcctcagatctccaacagattaaggaaacaataatagtggatggatgggagacctgagattgtaagcaaacgaaaatagatgaccgctatgtgaagaggttagatctgaattatctgtacaaatgtttgcttttggttttgttttgattttgctttgttctttgagttactataacccaggcaaggcttgactttcagctggcatcaaaatcagtcttcctgcctcccgcttctctgatgttgggatttcaggtgcagaatactaggcctagcagaaatacggaaataatgaggtcattctaaccatctgtagatagatggaaaagaaagatatttgctcaccataaacgtccgaagctggctggcaaatatggagggtgttgtagggttgggacatgagctcacatgatgctcaagtcaccatgatgagattcaggagacgtcatcagtagttctagcctctaagggaacagtcctggaaacaccacatttgcatgaattacaatcaacacaccgtggcaatttcatgccatgatcttataactttcaacaaactaccccagttttctaattctgagcacctccatgagtggaagagattgttaaaattctcttcagacaaatacattttctgccactttactgaggttgtcttttcaccatctttcatgtgtgtaattggagtagtgaaggaggacagtaaaatttattcattgggtcttttaatcaagttgggataattattgaattttgagccaaaaagagttaacaaaaattaagaactatttaatagtgtgtagatggtcaaagactttggagcatttggcccttaatggcatgtttttgccatacccctcccctcaagtcttgggaatctatgcagaagaattagaaatgttctaaaacccagagatggtcaaataacaatttccagattcgactggggtaaggcacacatgaactcacagagactgtgacctccatgcacaggagaaggggaagtggacagagtgtcccaccccagnnnnnnnnnnnnnnnnnnnncaggacaaaccctcccatacttaggagaagtttgccaacacaactggactctgaagttctctgtgtatgcacttggggttggtgggtttttttgtttgtttgtttggttggttgctttggtttggtttggtttttgttttttaagaaagaacatgtagttgggtgagtggggttgacaacattgttaaatggttacagccatttcccctttggataacagcactgctattacgattactaaaagaaactagggttattgatttgtcatttgtttttgggcggggaagggggagaagtagaccccttaaatcttaatccataagttactattttatctctacagaagtattttgaaatcatgatgtgtcttcatgagttctgttaaagtgtttaattctgttgttttcataacttggggttgtgtagagtgcctgtaattaattggaacattctatggacctctttgtgtatttgcatttattttgttatttcaaagtactgtatttttgtgtgattatatactttcttgagtgttgtggtctcatctgtgccaaggacgtgatctaccagcgagctacaccctgcgtgcctacatatgcttcagaatagcgttgcctcttattgaagctggtacaatatcagctctgctccttcttctgctcctttccccagaaaaatattaaggattgaacccgagctttcatgtattataggccagccctcttctactaagcctagttctctgcctctctttttgctcccagtttcataggatgtgaaagcaaaggtgcttcacgggtaaatacacctgggttgggtgtgtgagtatatgacagctctgggacatttttgttccctttattcctcttttggatttgcatttgtggggtttctgtcacctcatgcagtgtgttactccataaggtagctcagcaatagctctgggtatcttttagtttgaaattcttttggctatgtgcaagcaaacactgcccattaattagcaacccagcatagaatcatctgttgatgataaaattaccaaaacggatcatccataagtgtttatactgcaaacagtgcatcagaatgtcataatctcatttcattaaggaatttacatacacaccagattttagagtgctcgctcatgatgaacatctacttccacactgtttgtgtttggaaacattcaatagccagtcttgaatttaaaattttaattgaatgcttaaagaattacaagtgttcctttccctagctctaatgctaaccaagtgcttttctaaactgctaagaatggactgaagattctgctgagggctttagatacttatctgcctaattgagccatcgtttgttgacgtgaggaaaagcatgtggcctgctttaatgcctttctcagtaacagcaggaggctagaatgtagctcatccaggaggaaaaccagcaacatccatgacatgaggcctgggaaggtaacattggttgtacagttgtgtgaggataataatgtgagtggaatcataatctagacagtatagatgcttttcttcaatttgtaattgtgatgttttaatcacttaagtagttcacctaataagtgtttactggtgcttactgttgctaggtactttaaaggaattgttgacttgtcaaattgattgatgcaagagtaccagatggtggtaaaattaaaattggtatcgatctctaaagtaatgaagtactccaaaaggtttctgagtagacagagaatatgatgcaacctgtgccgtatacattaatctagcctgggtgtcttcaactaacggtaagacagatggttaactttaggggcattgataggaattagttattactttaatctttactaagataaacatgagtggaaaaggtgtatgtgtgtagctgtgtaaaacaaattagaagttactgacttagagatcatagctcctgtagtcagtccagagccagaagtgatcatctgtgtgtgtgatgtgtttgactgcaggaagatgaatgctaacagcatctatgtgatgttttcaatggaagaaattgagaacaactgaagagatccagaggcatcattctgaaggatggtccctcactgattaagatggctaatgagcttagatgtggccctccagtgccacagccagtgagggggcacggccaggtagagatccacagaataagggaagaggggggggaggtgagggaggatatgccacatgatataccacacgatacagcacatgatataccacaggatagcctaaatgtattaagaagaaatgaaagagctagagtaataaatcaaaagtttatgtagcaatttatgtaaatatatacatgcctgtctatgtagtaataagtataaatatactgctgatgttataacatgtacatatactttggtgcgtatatcacataggggaataaatcagttgtgtaggaatagttccatgtcagtggaattaagtttgcattactctgaagtagaaacaagttgtatatcataaagtttaaggtcacaaaagttgattaaaaaattagggtttcaaatgagggatagttttcttttttttttttttttactgcaacagttcctctatcaggttaaagaaagaaaaatgaaccttgtcctaaacttcatacttgaaagtcaaatgaatctttccttaaatataaaactataaaaaagaaaactgtcaagaaaaaaacatggaggaaattgtctggaattggagcttatcaagtctctatttaaaattacatcagctaaataatcaacgacgctaagggcacgttagttaggaaacaatcagtaggactattgttttgtacataatataattttacactaaggaacacattaaattgttttaaaagctatggtaagtttaagaaaaaaaaaaaccctgcaaaatggaaagaaagcattaagatctaaagcctgattgaataagctcagcacagcacaggtgaggttagcgaggtgaccagtgacggaccaaacggccaacacgtaggttgagacagtctagtaattattctaggaaagtgttggtccaataaatttaaattttaatacagtttgaaatttttctctgatttcttcttgtgttcattttgcattcacacatttttctcatggcccagttgtcccagccagatctgtggctgttggcgtcattcctatgatgacagacacatagcactgcactatctgcatcttttcttgtctgtgaagctaatagtgataactgggttctatgcagatagaaaccttgctatagagagtccaccgttcttcacccttgtatctccagcgatatgtctctgtgaaaccaccatggctttgagctgacactctctagctaaactgccctctttgcagaagactgtattttaaaagtatgtttggtaatcttatttgtttttctcttttttatttcatttttattagatattttcttcatttacattttaaatgctatcctgaaagccccctatatcctcccctagcccttctccccaacccacccactcccgcttcctgtactggggtatatgctcttcgcaagaccaagggcctctcctcccatcaatggctgactatgccatcctctgctacacatgcaccttacttgtttttctttgccagcagttactctgttgcattcatctgtttcctcactattaactgttctccttagtttcactttttaccctccttgcaccattttctttggagcagctagaatcatcgttttggtcgttggtccctttgttttgtggtgctgggaatcatgcccatgtttgttgtttgcttaggtgcttgttttatcactgagctatccccttagtcctggagtaacctttacaacatataacttagcaaaatatgcttttatatttaaattcccttcatgattgccatggagcccactccagaattattcttcttcttcttttttttttttaagattttggtggtggtggtggtggtggtggtggtggtggtggtattgatgtgagggtaatctggctgtgccagggttgattaggctgacctggctgattaggcaggtgcccttcctcccttactgctccctgtgcatccctcccaaagctgtgcgcctgactaaaggaggaccatcttcagtcaagggtataggagtagctgcgctcccctgctagaacctgcaaataagctcgcaaagaatacaaatttcttaatgctttctgtggctttctcctactagtccggtatcttcttcctgtttcttctctcactcttcctaaatccctttgaacaggctttctaagaactacttaattcataactatcagctttctacttatgtatcctcttggtgatcttttttctgaccagatatctaaagcttcctgtcctgcttctccatgagctgttgtctctgttcccctccaagcctaagccctgtaggtgtatatactgcactcccctcaggttctctcctagaatgctaacgagggggcatgagtaaacactttgcctatcttaaacacattatggctggcagatagcgtagtatctagcggtcagtgtctactcggtgtgcacatactgaatctgttatttccagcctatactgaagagcacatgtgttgcatgtattaaaactattgtgtttccccttgttttttcgttcttattttcatagtgggcccctttcctgtggtatcctatttgggacgtgttttattgtatttgctttcaattgaatatgatcatgttcaagtgcatacatagagctagtgttattctcctactaaatgtttctcttacatacaatctttaatatagtatcatgaacactgttttgttttgtttttgttttttgtttttttttttttttttggtttttcgagacagggtttctctgtgtagccctggctgtcctggaactcactctgtagaccaggctggcctcgagctcagaaatccatatattctgggtaatccctcttttcttcatgttagattatactgctcagcctaataaggtgatgattggatttgcttcctttgatcacattttgaaccaagttttaattctggagtgtatgatcaaaatgtttccaaatgttataatatgttataaaatgttctctataaaataatggcaactttgtatgtactgagaaaactgagaaagttattacttgagctttcaccaagaagacctaaagaagtttatcaaaagggattttagaaagaacagatttatagcagctgtctgatacatgcccagaatcccagtgttcggctaaaacagacttgccctgggctttctagagcgtaatgccctcagcaagtagctttcagcagcgttttcagaaagcaatatttcccttcagtgaagaggtcactgtagtgtttttctttttccttctcctgtcttatctttcgagttcaggaagtactttaaatttacaggcagctttgaagacatgaagcaagttcagccccagaaatatttcctgttatagcattaatctaattccatgaaagtagaactgatttttcatctgtaaagtagataaagtgcctggagcagctggccattattccagggttatcacgataaagaagcttagttttgacacgaaagagtttatcagaccaaccagtagaagatttcatctttttttgttgaaagatatattaatggattataatctgtcttggctttcaaaaaaaaagttcaccttcatattgaaaatgccttctttaatcagcaagtctgtgttcatatttatagagtatgtacagtaagccaaagcaatactggggtatcacatgaaattaaatctgtagcattatacaatttcatgtttgttttaatgttcaaataattttcccaatttgaaataataacagatttgcctcactaaccagtctggtgtaaatatctaagagagatatgggtagtttcctgcgagcatgtgtattaccaattcatgttaacaggtcatagaatttctgttaattcatagaactaattttcatataataagatatcttaatattcagtgagtaaacttgtgggtcctattttgtggatttatagtaaacacataatgcagatttactactctttttcctagttttcccatttgtcttccttttcttagttccccaccccactaaggctcttagatcaactccagggcttaacgttatttaaaccattattttatttgaaagctgaatctacattggacatatttatagtgtttttcttgaacaatagtagatggtttagatatatgcctactatatccttgcctattgcatatttagtcctctcagtacacttttgagggttcctatccatttgaaaaagttagaaaccaaacctcagaaaggttaaatcagtggttcaactttatctaccttataaaataagctatttgaactagacctcgggtcctctagtgccagagctccttacttgtggcctacactgtatgctcataggaaaaaggctatatcctgtttctactccttatacttgacagcaacatggacttcactgtcattgaatgcttgtttcagcatcaatcaatcagttgttttgattttaataagatctaattatttgtatgaaagtatgcaaaaaccatgcacagtcatagatcctttttattatggatatttaccttttgaaacttaaatcatctagtcaattgtggtggcacataactgtaacccagcacttaagaagcagagacaggaattcaagaacttccttaggccaggcgtggtgccatacacctttaatcccagcactcgggaggcagaggcaggtggatttctgagttctaggacagccagggctatacagagaaaccctgtctcggaaaaaaaaaattaccaaaaaaagaaaaaaagaacttcctcaggtgcatagcaagtttaaggctaggctatgtttcattgaaacctcctttctctgtacacgtacacacacacacacacacacacacacacacacacacacacacacacctttttgtttttaataagaaatcgaattagctagatatgaaaaatgattctaaaaagtaaatatacatttagggaataatgaattttgtaatggccccattaattccgttttcacaagagaattgtgtttggtgtggtggtgcacgcctttaataccagcactccagagacagaggctgatgggttcctgtgagtttgatgctagcctcatccatgtagagagttccaaacttgccaaggatgcatgcatgatgacaccttgtctaaaaaacaaaacagaatcgaataaaattagttagtgtattttgggagatatgagcctggatgttacatatattcaaccatcattcattgaatctccttaccatgtgtgtcttgtgaagcactgttatagattcaaagatgtaaaaagcattctctttatagaactactaatttactaggaagactaagatttattgcactgtaaattaacgagaagaggacttagtgcatgtatgtcctcataactaataggttagctgtaataattttggctttgaaacttattttacccccacttcatgaaaaatacacataaaaagcatttaggaagaggggatacatgtgtaagcaagtatataaggaagtaggttccatctccagcacccctcaaaatacacacatggagaggtgctaaacgtttgcatgaaagtcatacaggttaaagccataaaggtttaacaccatacccactagacactagaatggctataactaagacttgggtagtgacaaggcgttagtgaggacatgagtggactgaaacccatatactgttggtaggatattggcccttccttatttggctgactacagatccttactctttgacccagataccaaagagaaataaacacctatgtttacacaaacatttatacccaaatatttgtaacaccattattgaaaatagcacaatagtctaaataatcacctgtctatcaggtgataaattcctaaataaattgtatggtatcaaaaatggatgttagcatgcagaggagaaaaatgaaggaaggcgttcttcctttagatattagtatatgtctcttaatactttctctctctctttctctctctctctctctctgtctctctccccccccccaaaatggattacaggtttaaacacatagctagaaatcataaaactataagaagtcatagcaagcaatcaatcaaattgatcttagcagtgatttttttttttaatgtcacctaaaggataggcaactggagggaaattaaacaatcaagactgtaagcttatattttttttcaaaacctacattaatatgggttcttaaatactttaactttccttctagcccataaccaccagaggtagagggaaggaaaggttattaggatataggggaagtggacctgtgtaggactgttctatggaaaaaaatcccatctgcattgtcaggaaatccgcagttcagtttacaggagtcagcagtatcagtttgatcctctcaaaaatacttaatgagtataccagcagtccagttcagtagtgtcaggatagcaagcacaaatcagcagtggtgggactacctagcagaaactagcaggtctcacctgacttgccacgagtcagcacgagactaccaagactatcagggctgccaggagttctctgcagtgtctttctcaacaacttgaagatcagcgaaggcacaagaccaagcctctttcacagtctatgagtcgtgtttatactccctccaaatgtcacgtgtcctccatgacgtcagtctgtcttagcaaaactccacatgactctgtatcagctgacatcacactgctagtcagcatgagtgtgtggaagcagcaaggagccaccaaaacaccaccagaagttttatggtgtgtttctatggagtgcgacaaacagagctcagctacacgatgtcaggtgaaccaatacatgtgtgttgttagcaaagaatccttcatcacacgtcctttcacattcttactttagcaaaacatcctttcacccatgtctgctttaggaaaacactccttcacagcaaaacaccattagacacaactgactttccaaagaaacagtaagtttccatttcacagggcatccaatgaaacctgttgtcatctaaaagaaacagcaaaatgcaaagccatccaaagatggaagggtacttttgtgaaatgacaagtagttaagtatccaaacttgtaaagaactcagtacacatgataatcataatcaatttcaaagtgagccaaagcataaatagacatttttctaaagaagatgtagaattgccaagaatatgcaattattgtatgcacatatatattgtatattcttaatatgtatggatatacaataataaggttatttacaacaataagggcaccagatctcattatagatggctatgaaccaccatgtgtgggacttgaactcaagacctctggaagagcagccagtgctcttaacctctgagccatctctcaagcaccaacatgctatattttaattactatattttatagcacagtgaaaataaaaggttactgacagaaaaaataataacaattgtgttagggaacaactgagactgacaacagacatcaagctatggcatatacatatctcccagaaacatttatgtacacttcacgtgactacgtactcacacacacaaaggcaaagtcagaaggaaaacctgtacactcttcattcataagaatgtaacttagtggagttaccatggtaaactgcaagtttctcaaaaacagatgatccaacaattccatatttgaatttgtatgggagaaagggtgatatcagtatatctaaggaatatctcctttggttccattccagcgtcattcatagtagacaagtgtgcaagaacatcttacgtttacatcaacaaatgaacagagagaagatctgctatatgttagatacacagaatgcagtgttatttgatattttaaaataagcaatgttatgctagccaggcatggtggcacatgcttacttgccatcctagggctcgggatcacaagcttggggcaacctgtacttaagtagctacattaaacagtatgtaaaaaaaaaaaaaaaaaaaaaaaaaaaaaaaaaaaaaaaaaaaaattaatgaaaacaaggacatcctggcatttgcagtaactcttgaggaaacaagctaagcccagaaaggtggttgctctacagtaccctagagccaggatggtgcgtatggacaaaagttgggaagaagagaaggtgctagtctgaggtgcaaacttgtccttatatgatgagtgtgttcgtgaggtctaacataagctatagtaatcatctttgcaattatacattgtaaacttgaaatttgctgagaaactcaactattcttactgtacaaatagcttgtgagaccatggctgtgttaataattttggtcatggtaatcagttcacatggtacatgtatcaagaagcttcattttgtgcttcttgtataatttctatctgtaataaacacataattagactatataattaattaaatgctaaatatttaaattttaaaaaataattttaaaatatttagaaacaaaaaacaattaaagaataaaatatagaaaagaaaaaataagcctggaggtagtggtgcacgcctttaatcccagcacttgggaggcagaggcaggcggatttctgagttcaaggccaggctggtctacagagtgagttccaggacagccagggctacacagagaaaccctgtctcagaaaaaccagaggtttaaaaaaaaaatccatgctgggatattgtttagtattgaaaagggaaacattaagttcacacatgctttggcatatagaaatcttgaaactatgttgctaagtgaaagaagccattgatagggggcatatatttatggtgacagtcataatgaaggtccaggataggtcaatcaataatgacaggagatacgtttagtgattatcttaggctagaagctttgtaaggaaatggttagagtactcattgataaatggtttctccagggattagaaagatagtataaaattgtagagatggctccatgactgtcaacatactgaaactgactgaacgcgagagtcaaaggcaagctgattacttgagttcctggacagctagggctacacaatgagagcctgtctgaaattctttttattaaattatattttataaacatatagttgtacatcttattgtataatatgtggacctattagtgttgatggggctttttttttctacccagtacatagcctcttatgtgctaggcaaacatttctctactaagctgtatccctaatccaaaaggtatttggttttcttttaattatgtgattttcttttttacctgagctttgctctcaaacccagtgcgttacttgtgctgggcaagcactgtctgagtaagctaagcctctagtccttcagaacgcttacattacttagaacagttgatacgtctaagaacaaaccatgcaaagagattaatatttgtgtgcatatttattcataatattaaagacataaatgtagacaatgtgaggtgtcttaacacactgaagaagtatatcatgtaaaaatggccttcttgatattttatttcttcccttttatttttttcattaccagctggctccaggatccccacctcctgtaaacacaccccttcccaagcattggaatcacagacagccccccataccccgcaccatttgtaatgcactgggtatccagactctggtctacacatacgggttttttttttttttttttctattttcatccagctctgtgttagaattagccttctcactgaattgtagtccctgttgggtaaacacattatactatttgcagtggaacttacatgctgataagccagtgaggaaggatcaataccagaactttataggtcgccagttctgtgccctgccccttcattccccggctatgctgcatgacctgcttgtaagatgattaagtctatgggacttcatgagccctctcccacaccgtgcaatgtgtccctaaaggaacaaaatgcttcatctatttgtaatttagtcatttggctgaaaatgcattttgccacagaaattaattccttgtacagatactacttaatttcccatgttattccacaaatgcttaacacttaatgaagctaagtggaagcagtcattaggtaaaaagtttaatgccaatagtgaatgtgaaagccgttgtctcatttcctaagggtcctaggttttctgttttgaatggggcagcattgtctgttttgtggatgagtctgacttcggagactcacatagcccctgcacagcccctgtttggtcctgctcttttaactaatttgaactccattgaagagtagatgtcttttaagttgtttcctagactttccttttgtgggtgaagtgtttttatttacttgagtattttgaagtgttcattcaaagaactgagaaagttatccactactctgtagcacaggttggggagtgtgctctaaggcagcctttccttctgcttacatctctttccattgactagataaatacataatttatattgtggaaacgtgggcttggccttttaaagaagccattcctttttattccagtgataagggatttaaattcttcttcttcagcatccagcagtgagttcagaggtgatgatcattaatatcttgatccatcgcttttcagaaaagataaggcttttttcccgtaatggttcatttgtctgcttgctttatttcccaccaggagtcacaaaatccatttcctgtgacaatataataattttctcaacatctgattatagtggcacatacatgcgggttagaaaagaaggaaaaggaagacactaagaataaacactgtgatggaaactatttttatagtcataatgactaagttagaagaacaaatataagtactggattacaaaaggctcttgaatattttcctaaaacattccttacagggactgcagaaatagcttggggagtagcagagcctgtaacctcagcggtagggggtagagaaatgaagccccacaagcctgttggctagaacagtgtagctccagtgtggtaagagactgtgcttactcagtaaggaagagaacaagaggagacaccccttttcctgcactgacctctggatgcccatgcaatgctcacatttgcatactcacatgcttgtaaaacatacagttacagtttgattacatagactgtttacctattcacctatatggtttaactcttttttttttcctcttctggttcagaaatagcaaggatggatgttacatgtattctctgctaaacaaaacagagcaaacaaattcctaaaatcagcggctcctaacctgatacattttgagattttagtaaatgacttattgataacaatttaaatgccattaatatatctaaatcgggattctgctcagccggtaagggtgtgtgctagaccacctgaatttggcctgccaacctatgtaaaggtgaaaagaaagaactgattcccttaagttgctctgtgacctccacatgtgctctgtggcactcactcccacagaaatacacacactaaataaaaaaaataatttttttataatttaagtatatctctaaatttgaatatcaatacctgtctttcttgtttgtttctaaactgattctctagtataagctacatagcaattattacacaattaatgaaattaattttgaggtataatagcagtaattactccctttgtttataaagtaccttacgaggctgaaagtggctgcagtggagaagaagcaagttggcattccatagtatcacattatagtgtgtttgcacctgttcagaggaaagggtgagttagttcctgagcgccccacaacgccccatagctatgcagtcagttccatctctgttctgctctgagccatttaacctctcttaaccttggtttccttatttagaggaagtgcctgttgaaccttacctaaatcataaagtgactgccagtaattgtttactgagatttctaggaaaggctaatggaaaccgtcaagtataaatgaaagagttataactgctctcctccctcaggaattccagttcacactgaacctctatcaggaatctgcctctcaaataggggctatttaaatacacagattaatctgtctataagacttttgataaggctgatttcaatagtgaattagataaagtgattagaagtaagtttatagcttaaacatttttattccatttaaatagaaaaaaagcagcttgttaatccaaacctaatacacaaattctcaataaattcgaccaggtgactgtggaaatgaatgattctcttttattacggatttaagaccaatcacttgtctagtgttcattcaaacggctcggccttctttgcaggagagggagaaccatcctgtggctctttctcaggagcccgtccaggcagtctcacttttaattatacattttgactttccaagagggaggtataaggcacagctttgaaaactctatgtgtaagtcaatccatttttcaaagagaactgatcaagcttgccagtagatcagattgtgatatactaagggcagctcagctgtgtgtgggaaaatgccgggagacgagggtggtaaaatgtgtagggtcagaaggactttatatcccatgccttggaattccaaatggttgggagccataaaaaaccttttaagaagtagaggaatataaggctgtgtttgagagttcttattcccttatgctaatgaattcagctccatattgaaggataattagtacacaaatatctccagctagtctttagtttcttactacatttagtttggaaatatattgaaagacatgtaaattagtgacttcctcattgctatttattctgcaattcagtttttcttggtgtctttattttgtttttatttattgtttattttagttatatacttctgaggcagaaagactggcctcaaccttgctaccatttgccacagcctcccaaggaactaaaactgctaggcagatgtagttagtatttatagcatcatgtgttccttattggttttcacagaagcagctttcgagttctcccttcccacccagcccaccccaaccctgtgccaaacaacaactcagatttgctctcactttacactttgctaataattcctgccaaagtctgggttgtagtttggtattaaagcacataaattttgggtatgagttaggttgcttgcaccaaaaataacaatgatttctataaagcatatattactgattgtgtgtctcactagtagtgtgtgtttagtatgtgcaaagccctaggttcaatccccagtctctctctctctctctctctctctccctctctctctctctctctctctctctctctctctctctctctcacacacacacacacacacacacacacacacacacacaaattctacatactctatacatggtgagttttgttttggttttttgagacagggtttctctgtgtacccctgcctgtcctggaactcactctgtagaacaggttggcctcaaactcaaagctccacccccctccccgcctctgctgggagtaaaggtgtgcaccactgtctgctcatgctgatggttaaatttgtaactgtgctgtttgccatatttacttgaatatcccaccataacgtcatctgccataggagggataaagctgctgtcataaaggaataaaaccttctccttaactgactttgagtaagttgttaagttttgagaagagactgtcggagataaatattggggaaagactgaacaagaaagttttgggcttttggtgaggggtaaataacaggactgtgggtggtttcctaggaaatgaatgcctggggatgtaaggctaactgataaggtttaaccacggatttaagcagagaagctctcttcctggtactgaaagtgaagcccattctctgctgaggcagcattacagagccttgagccttgaggatgctatgttctaccacaactatcccaagagcattagccttccttgcaagtacaaaagttctctctgaaagagaagtttatgtcctgctttttacagaaagggaaatgggaagttcttctgtttgctgttccttcactcagtctcttcaactcagagataaccagtgtcaaagtggctggctctagtctccttgcttatgcatttccccttgataaccagcgtgataaactgagatgattctaaaactgtggttgatagtctatgctgtgtctttcccaccttagattttacctctgtaaagtagaaatcaggagagtacttacttcaaaagacaattaacaaatcaataaaaaatatgcaatagttcttaattaagtgatgtggcaaatagtaaatgtttaatgaataatttatacacccttagagagccattcccctaagaatacatgttatagagtagaaagataacttaataaagtacttaccgagaaagcaggaggaccttaatctgatccttgaaatccacataaaaaagccaggcacacttgtgaccccagaggccacccccttggggggaggcagagactactggattcctggggcccatttgccggactagccttgggaaggatgggaaaagctgggggaaagacagattcatttcaaggaactctcctgtatccctatggtctccatagggatactggctaagcagtccaagaaccataggtaccccagaagatgtcagggttgtggcactggcatactctatgtctaggcagaactgtcttccagacattgcatttctctttctcaaggaaagggtgcttccaattatccagattactcgcttgctagacatcagctgattaggagcggtaattgcatctgaaaaaatgccatcatgattttgacggtggtaaaggctgagatcttacccatagagagaactgagtgggtcttctactcagggtttctaggcacttgccacctttggaaagaattcagagatgaggagaaagttttgttgaagtgtggaagtattcctgcaatgagtgaacatgcacttctccagagaaacgatatcacaaaggaatctggagcgtgtctttcagtttggggtttgggtggtttttgttgttttgagacaaagtcttatgtatcccaggctaacttcagacctcctgtgaaggtgaggccacgcccctggtctcatagtacttgggttcctgaggcagaaatctggtgaccttccagaccagcctggaaacagagtgctctgctgtaggagatcaaacaagggtgaaatccagaatgcctgtgtgactgaaaggtggtggcaatgacagcaccgtatggcttctgcacacctgtttcccacggccttacacagtacctctaagtatctaacaattgttcaataatgctcaaaaacataacctgaaatcaatcccttatattcatttgacatgactgtactcgcagtctgaaggaccatgtctaatgctcagcacagtctgctttcctcagtgggagaagggccttgtgtaccacacccttcttcccctgtaggaaaccctttaagagtaagagtttggccctttttgatgcttcagagctttatagtgttgcattgataaggtagttaataagtattgcttgttgtactaatataaaggaatacacagaaaaaaatccatccaaacctcatcttacaatgcatgtgtgctgagaggcgcaaccactctatttgaagtgttttatgtaattggataaagaacgtgaactactctctcagtggccttgatttgtgtattgaagttaaagtttgtttcctgttgaaactttgtaaagtttctctgcatgggtatctgtcaactagcaagacttcttaatgtctgttctgtggaacatggcaagaacagttaaatgaaaaggaacagttgcagttttatcccaccaagcaattaaagtacatatttgtgctgttttttccattaatttatttattcactttacatccctaccccggttgtagcccctccccttttcctccaatgaagagaccccctctgggtaccaacccaccctggtacatcaagtcactgcagaactatgcatatcctctcccactgtggacagacaaggcagcccagttaggggaacaggatcaacagacagacaacagattcagggacagctcctgctccagttgttgggaagttgtatgaagaccaagctatagatctgctacataggtgtggggacctagatccagcctgtacttcctcttcagttggtggtttggtctctgagagcccccaaggatccaggttagttgactctattggtcttcttgttgagttcctatctgctcagggtccctcattccttcttcctaatcttccctaagagttctcaagctctgtccactgtttggttatgggtctctgcatctgttttggtcagctgctgggtggaactgctcagaggacagttatactaggctcctgtctgcaagcataacagagtatcattaatagtgtctggaattggttcttgcacatgcgatatgtctcaagttgtgctggtcactagttggacactcccagtccctgccccatctttgtccctgcacttcttgttggcaggacaaattttgggtcaaaggttttgtggttgtgttggtgtcctttaccctccactgtgactctatctcagactcctagcacaggggaatatggagtctgaagtggccacctctcaattgtgccggtttatggtatgtgtgtgtgtgtgtgtgtgtgtgtgtgtaggtatatattacatacacatataacactttgacatatctgttaagtcagtgttctccactgatatatagaaatcactctatttttaaattctcttttacttctacttaaatgttagaaaaatgtcagaggaataactggacttcctatctgttgttacacctctaaaatttgtaagaatcatgactctactttttatcttttacagggttaaatgaatttttacttgcattgctgaaaaaggttaattgatatctttctaatgattttcttcttcagtgtatcctgattgtgtagcacttaaccagtcagtggtataagcacagatttctttgtttaaagagagagagcaaaacatattccatcccagtagctttatagtgatttcattactagaaagctaaacattaccttattgtttgttttagccggtaaaattatctgcaaaccccataactacgtgcaaagtagtttgtttgctttctgctattccccatggagactaaaaagcagagcaccagtgtgtcatttgctaactgttctttcctggggagcactgacagcgtctattgaatggttgtgggtacaatgacaattgctaacaatgaaagatgagtgtcatttctgttctctgaaatatgagtaagaagatataaatgaagccctttcctgagttgacatccagctttgacattcatttttatctgatgacctgatccattttggtcaacaaatcaggaagagaggtgggcggagagacgactatgtggccagcctactggaatgacttactacataggtatttccttccatttgtcagaaattaaaatttagtagtactgggcgtaaattaatactcctaaattaggtagggacagaattcatataaatggatgtaattaattctttgtaaagaagtaaatgtcagaatagttaactcagtatcagaaataatgattacagtaatgacttttttacattcctaaattttttattaattatttgcggggaatatgcatatgccatggaacagttccagaagtcataagacagtttgtaggatgtgattctttacactcatcacacttagttatagatatcattacctaatgagacatcctgctccctacacgaccattctctctctctctctctctctctctctctctctctctctctctctcttctgcctttctttctttctttctttctttctttctttctttctctttctttctttcttcctgtctgtctttctttctttctttctttctttctttctttctttctttctttctttctttctgcctttctgcctttctgcctttctgcctttctttcttttccctgtctttctttctttcattcactcatttatttatttatttatttatttatttatttatttattttgctatagacagtttaaaactcaggggattggagagatagctcaaactttaagagcccttggtgctcttgtagaggatgcaagtttggttcccagaacatttatcaggctcatttatctgcttactgttgttactgtcattctgactccagggaaaacagggccactcacacagacatgcatacccataaataaaaataaatctatttttaaaatctgcatataaagagaattcaaaagaagacgacccattgcattgattaaaaattttattttcctattatggttgcccatattagacaacagtatacatgtgctgtgttaaaaaaaataagaaaaataatatagtttcccttgagaaaataatagtttcagtaaatttgcaataaaagaaactgactctgttagcaagaaaccaagagtggtatattttagatgaatgagttttgacttttcagggtgacatcagaatttatcagaatttggattctgtcattaaacatgaactcaagtgctcactgtttctgtagacccactgcttctgttggccatgttggtgctggtcacaagctttgctgccctcagagttgtcagtcatttcctcttcgtcacggaactttagactcagtggttaatcaacacacaggactataaaaagaagaaatgactcgagctatgcaagctctgttttttattttgacaatataaaatcatgagttataaatagatataaaaacaatccttgagatgtatgtcaggaaattcataaacaagaaacctcatttaggtacctaaatagttacaataaaaaataatttgttttcagaaataatgttggatagaaagttgtaggtagatgcttacatattctgctcctgggaatttagtgttgtaaatgaaatactgtgatttattgtggcatgcctgacaacctgagctcaatcccaaatccacatataggtaggtagagggaaagtgacaccacagagttgtcctctgacctccatttgtgcactgtggcacatttgactctctaatccaattaccagtaataataaataaaacaatattttaaagctgattaagtgaattatagacagatttctgacttgcttcttgtcataggtcattagactttttgactagtgttactttaatctctaaaattataaactattattattggttataattatgaaaaaaagaaaatgaaagacttttgttataaaaagaatggaataatttctggaaacttcagaccttatagtcactcagtaagatgttttaaattgttcctattcagtagtaatttcgtgttctgtttatttgagcaaaccatcatttaatacacagatttacaataaaatatcatttcttaaaaagccaagaaacacctgcttccatccagatattttattgaagttttttttagaggaaatccagctagcaagtgtcaatttgctcacatttatgacaaaaattgacatgagaaagactaaggcctcatgttccatctcttgacaatatctgcaattaccgtagcttggactgatcaattgttgatctttttcccatcattcaaacatgctgctttgactctacaaccatgtgagaatggttcgttttgtttgttctctttggcttgaagccaggggtctcttattagtataatgaagttcattgatgtgaatttgttgatctcttgggtagattttcacaaatttaaggcaattaaatcttttatatgacatttcacttggagttattagtagtctttgagtgatttttgcttttataaattccttcatcgttttaggattatttccttccccgttttcttgcttcttctaacctttaaatttttatttaaaaaaaaaacaacagttggacacgaccatttcattggtcagttttataaatacaatttataaacttgtaattaatgagctgttcatgttttaattagcacagtttttaaaagctcattagtttttggttttatgtgttaagagtttttgtcttaagcgtgtcttcttccaaatgaaagccctgctgaatttggggagtaacaacaatttggagacttgaatttaaacattattaattttttaaaataaacctttaaaagatagtttttatttctgtagtattctcattattttctcacagctagcacgttatattttggggtcctgtgatagtgaatggacttttctatagcacatgagaagaaaaaatgtctaataaataaagatcagccacgtcttaaaagcagtgcttccaaattaataaaataaaagcctttacttgtgtgtgtttattggaaatcattgataccatttattttattttacttttaccgtgttttgcctacatgtcgacaagtacagcacacgcacacggaccttcaagagaccccgggacctggagtaacaggacgataatgagcctccaggtggatgctgggaattgaacccaggtcctctggttgagcagtcaataaaacacataggatcacttcgtagataaacattctctctacggtgtttctgaacaaggagtgggcaaacataagttactcaatttagattaacagtaagtatgcaagcatactcatggaggaaacccagagcaacttgaatcaagcagtataactgaatctatggcactgacaaactgggaacagctgagacacttaaggaggagtaaggaaaggcccggaggctggagagatggctcagcagttaagagtcagaaggtgcagggcagggccctcgtggaaacagtctgtaaagaagggcttatgccaaagggaaactgaggcaagaaatctgatctatgtcttaggttctgaaatgtggggtcatccacaaccacttagtaggctctggtctgccatgtgataaatgaggctctgtcttcagaaacaagcagacaggaaataataatcaaaatagttgtgttggaatactccctcttcctttccctccttaacatatagtgagaagtgattttttttgttttgccctaagttatattctatgtcaaaaagttttatttccagacagttgggaaatacaaggagagaccaaattgaacatgtctcttttcttcaccctgagacaaaaccattattgaagtaggcacagtttgggaaatattagaagaatcaactctctcatgtgagggacgaccattttcaggtgagctgagccttttttccctccttgtgaattgcctcacccacctttgctgttatttacctctggtgacttgaagagaaaaggtcctttcacagccaccttcttgctcctactcctgtaccatcaccttttaaaacttccactaagaatatttttgacatgttaaacccctttcttaacctgatgccactctattttattttcaaatttgccattagggactcagacttgcaggttttttttctgtctctctttaactgctcctctgcgccaaaggaaaacctgcaagagcacctgccctggagctcgttccaaccagcatgtccaagttttctataagaaaatatacaaatcttttgtataccaaaagatctctggataagctatgtgcactatgtgcaagctatgtgcacacagagacccacagacccttccctgtactctcgtgtgctgggtggaaattgttttattggttgtgcttaaaagtttgctattctccatttgtgaaatttcacacattgataggtcaaccggctttgtgcttttactttttttcctatccagacatataaataatatagttgctttaaaaggctagaacatacagaatacttagagtgtttcgggtattggctagttttagagtgctgcttgtggggagattctgattgagggcactgagttctgaaaatgtagttaagtcttatgttcaggacaagtggtttaatgtctctgccagattttaccttgccgcttactgggtaccatttaagtactgtacagagacaaaggagaattgtccctaacaaatatggaatttctaaagttcttatttctccttttccttttcgatactctgagatgacaggacccgacatggacatgctaataaaatgttcctttccatgaattacaaacagcttgagaaaatatttaaaggagaactgtaatgattcgtcctggtaatctccttcttactgagaatgtctttgtcagaaattatgtcatcacaatggactgttagccaggaagttctgtctagcagatgaatgaatgtgaagtactgggtttctaataaaagacactattgtaatactgaaatactattgccgaggcgtgccaattttctgtctttaaatttataggacagttctgtgtttaaggcgtacttaagagtaactccttagagtaaaacaactagacacttgagaaaccggaaatagaaaatgacatttcctttcatggtaccatttaagtccccagtttctccaggttcagctgcttgatgcttgttcctttgtctcaaaaataatagccaaaaaaaaattttttttaatgagcatatttctttctgtaccatttagtatctgtttttatctactcatagatactgtttaaccctcttcccttcctggtcatatggcttccatagcccatgggtgaatggtcagaacaaagcctttgattattcttgtcaggagaaagctctgacagtattaattacatttcagttaattcactcactgtggctcgaatgtgggatattttagatatctgtcctttcccttttgtgacactagctcagtttttatttcccatgaacagcttacatgtattccctttatggtagctttacccatagtaggtattcggtataaccgattgttcagaatttttatgtttcatgggctaaggatatctctcctgctgttccatctgcttcctgaagtggatttcttttaatggataccagaccatacaattaatagtgacctcagcgtgcatatgcaatatataaaaacactgaaaacttcgaaagaccatttcgcaatgctactccccaaatctaacaaatagtaaaatatcttatctatactagagttttattatacaatgacagctttttcatgtgctgtattatagcctgttaactaaaaataaatgggtatttaaaatggaaaatgaaattacactgttgcctgaaatatcttaactcaggttttattacaggttacatatggtctctgttaggacttggagtctgtgttggttgttgaattattatgtggattatctgttgcatttgaaagttcttgactttaaaagcgtatgtctgttttaaatcttacacaaattccttgcaggttttgtgaatggtctaatcccttttttgtatttccttttttgtttgttgttttgttttttataccagagcataaagtcctcagcaacagcaaatacagtgcactgctgtggatcaatgtcattagtagagtgttttaagtacaagagcctgtaagctgttgacctagtgtacagaatatagaaacacttagtagtcggaagaaattaagaaatggtataggaaaaaaattattttatccccatcctcccaggagagctaaaactggccttgacagtgtttcctaactactcctttaaactcctataaatcagtctatagaggaagagggaaagaaaggaaaccagtttcattcatgatcagattttcttataaaacttaatactgatgtttctggaaatgattgaatacgtaattaacatttcctatttaatttttttaatctagatatttttgcatcagagtctaacagtttagtcacagtgaactcgttcaatttgaggaagaacggaatgagccagcctgtgtcaatcacacaatcagcattcacatttcagctcagattgccctggtctcgggctgtaggttcaggtagctgtctggtatcagatgtgaccgtggtttcgttggggtctgtagcttatcacacattcagctccccctgcagacatgaatttctgtgaatgaggagaatcagctataggaaagacaggatattgattaagtatacatataggagaaaggtggctcttggataatgcttagaacttcactgtgagtcagggatttgtggatttgtgcagatctcagtatcctcttctggaattctgaacgagtgatgccaagtttattcggttgacaccgaaaagtaaaagtctagagaaatttctaagcggttattttatctttgagtatgttttcggttttgtttttttaatgctgaactcttcctgccattgaccagtctgttagggctgagtgtctctactgctgctccctttttcctagaagttgtgaggaccaaacacaaatctgtgtggtgtttgttggcaggcatccagtttgctttgttttcttccatacggttgggccggactcggggctctgtgtggtttattaagagtctataattaatgttggataagaagacagtggattagcttactgtatgcttgttgttctcatgccataaaagaccacagcacaaagatttagtcgtatcttcactcactacacaggtaaggtgtcatccatctccttacctttaaagtgtgcttgaagttaaatatgtcatataggtaattgagttactatatgttgtagcttcattagctactaaaaatattctcctaacaaaaacaaatagaaaacatcatcttcaaggtttttttttttttcagaaatattgccttaaaagtacatactgtactagatagttgtaggaactatagagacaaattaagcagaaacgtggggttaaaacattctcaggcctagagaaagaatgtttcagtttcagatagaaaaatatatttcaagaaggtggtgcctaaattgaaatttaaaggaataagtcatgtacatattaggaagaacaactatctagacatgaagaaatagcatgcagccaatgtgccatgagcttgggaacatgttcaaaaacaacatggaggttagttaatgtggctcgtgcagaatgagcagtgggaaggtgtaagtgtaatcagagacacaaaaggttaggggaaatgttgatactttatagaccattgaaaggctctgtttgtaggtgtgtctcccagcgacatttaagaaccattaagaggggttttccctttgtatgtggacagccaactgagtacagcacaggttagtagtagggaatgaacttggaggctattacgatggcccaaaagagggtctgatggactgagagatggcagtggttgcagggaggagcagccaggttctggggatctcttacagatacgtgcagtaagctgactactggattggaagtagctcatgagagaagggagcagagtgaaggatgaagcctccattaacttagagaaggggcgaatgggaataatttggcctggttttacataaattgtgggaaaatttgttctcatagtctagtgtcccggagctagtctttttcccattttccttgtaatggataagatataggcattattgactaatttaaagatgtgggttttttgtcccagacttaatttagatttaaaattaagccgcacttataatgaataagttggtttcaagttcactcattttcttattcatctactaaataatggattatggagcacaccagtggaaacaaggttcttttcttagcgttttacaaaaacatctataatgttttctgtcccactaacatatttgtgtctcctccccccacttggcaagcctgtctgaaagtgtagtgttccgcgttatgtcatgggtatacgggagcacatgtgttcaatacagtcctaaatggaagcagctggtttcctgtgccgttgagaggaggtatgcacacagctgagaccctcaaactttaaaactctccgggttccttttctacctcatataaacgcattctgtggtttcaattagtgcaaacgtgtaacaagctaccttaatggcttaaaaaattattttgtttcaattcttaaacagccaagtacagttcattttctttctccctgctcacagtccctaactccccagcatacctctagcaaaagaacatgacacctttggtcttagttttctactagggtctgaaaaggccctggcaatggggggaagttagcatctcagagggaaaagctgaattcatacacaggaactgcaggatactgtggtgttttactagtcccctgtaacactggcaagtcccataaatacctaatggaaaaacagcagaaaatgagatctgcagcagcctttggagatcgaatttatgttgctgagaatttttttgaggttgagtgtaaaggtcagaagaaagtggatagattaaagttgctgatttttgcaaacttgaggccacattttaaaggtttctctttctgtagcatgaatgtttaaagataaatggctttacttcattagctgaagtgtcatgtcttcatttaatatctgttacctgggacatttggtgatttcatagtatttacatacagtaaataaaatcctcagtcctttttaacaactgtagatatatttatgaaataattcatcttcccaataacagaaatttgatgaatgaataaatatacatatttgtattgatataatctatgaattttaaattaatcattttagaacttagagcttatatagaatgaaataaagctaaaaatgtctcttttacaagcataagttcttgattcagcaatataattgtaaccttttctccaattatcttgtctattattacactttgacaccaaaggtgagtaaccataaagaatggtggcattctgtgtcaatgaaacatggctcatgaatgctcttgcaggattctttccttctgaataatctttgaccatactataattatcatgagttaccagaccacttgctagtggtgggaaacattagctttcatttctaagcatctgtcatgaattgatagtaacagagggccaacattgtatccatccaaatctatgctacacgtctatcttcggaatggtttttccttactttgatttcatagtacagattggatcatgaatttaatacctagaatacccaaaacataagctgaaactacgacttccatgttcgctgctaatacaatattttcttggaaattaaatagatggttttatagtaaagtgaggatgtgtagaatattgtccatttatgatggtgaataattaacattaaatctattcatttttctccctaggaaaatgatgttatgagtaactcatctgtaattcatggtttttaccctaaattttttagaaaaaatccatgaataaaatattaattttcaatattcttttgtacttaaaatgattgattaagctaggcatggtggcacacatctttaaaccagcactcaggaggcaaaggaagcagatctctgagtttgaggccaggctgctctacaaagcaaattccaggacagtcaggcctgtgacacagagaatccctatcttccaaaaccagtgtgtatatgtgtgtgtgtatgtgtgtgtgtgcgggtgtgtatgtgtatgtatttgatgtttaatatattattatacatatatattaattactatatattaacacatattaatataaaacattaaatgaccattgacctttgaattgtataatcacaataaacatgttaatttttgttgtagttgatattttaggtccatttctattaattctggcaaccatcatgtttacaaaaatctgtagagtgagttctggggatgtgggtaaatgatggagagcttgcctaacatgcagtctgtgggttcaatccccagcacatatatacactcacccgctcacataaacacacatgtgtgcacacacggtaaagaaatcttttatctctttaatgatagcctatgagcacaccaggttgtcccgaatttcacccatattccacaatgccttattctcactacaatttattgcagtggttctcaaccttcctaatgttgtgaccccttaatatagttccttgtgctgtggtgaccactaaccataaaagtattttgttgctacttcataactgtaattttggtactgttatggatgataatataaatataagatacagagatatacatgctatctgatatgtgacccccccctcccctatagaggtcacctctcccaggttgagaactctgacttatggacagtttcctcctcttggcatatttattttatttcttttattacactgctaagtacaactgtacctttcctttaaagtgtcctttccaattcagtcctgtttctaatcaatagtctcctgagggcagtgatcctgattggggaggagggagaagatagatgtatggtagctagtgctattaacagaggcgtaggaagggacagggatgaacgaaccttgggtctcctgcaggatcttcctccctcttgccttcctcaggaaaaggtgttctaccctcagtctattgctatttttcacttttgtctcgaggtttcgatttctggttttgttttttaggtaggcacacattttgtagcccagggtagcccctgactcatggcccagtagattcctgcttttgctttgggttgcttttgtgcttttgtaatttgagagcataaccccaaaacccctttatagttttaacaagcttgtcacctctacacatctcttaaatcttaatggaattattgcaaaattcttagatagctattaaaatgtactatctctcttctttgtccattgattgggggctttttcccttggttctgatgtagcttcaagtgtgtgtgtgtgtgtgtgtgtgtgtgtgtgtgtgtgtgtgtattacatacatacatacatacatacatacatttatatgtgtacatttgtgaaggtatgtattcatacatgcaaagaccacatgttggcatcagatatcttccccaactgctgtccacaatgatttttaagctcatcaatttggctagactaaatggctagcatgccccaaggaaactttggtctctcctgagacccacaacattggggttacaggtctgcacggccacacccaagagtttttacatgggtgctggggattgaagtcagctcctcgtgcttatgcagcaagcacttttgaggctgagccatttttcttgaatagattggttatttttatttatttatttatttagttagttagttagttagtttttttgacatggggtctcatgttacagtcactctagggtggtctggaacttctactgtagtacaggctggtctcagcctcacagagaccctactgcttcaggctctcatgggcttggattgtttgtatgaggtaccatgcccagctcagtaaaaatggtcttggaaggaatacttttcttatgttttggtgctagaacaagggttatataacagttttcctcttataaaaatgaaagttaagaggctggagagatgtctcagcagttaagagcagagcagttgtagaagaattgaattcagtttgcagtacccacattgaacagctcacagacatctgtaacttgaactctgtgggactggacaccctcttccccctccatgggcatatacatggtatatacacagagacacaaataggaaaacattaataatattgtcactaatgtctactgtatctctgaaattgtatgactatcatttttaatattttagtatagaaagattttaataatacataaaaattcaataagattgcagagtaaactcatgagcctattattctcttaatgtattatcagtgttaatattgtaattgcttatcatttcataatttatactaggtatagcatcatatacatgtaatatatttttgttttgaaaaatagtaaaaaatacataatcaagttattatcctggtcacttaaaatagaaaatacagtataacaaatctcttgcgattcaagttattctgtgtctgttttaatatctccctcttaggccccttgggagaaggggaagggaagactctgtgatggtgaacctaaaggggagcagtgtttgggatgttaattaattaattagttaattatcttcctcttgtctctgtaacacagcttcttacaaccactgttcattctatgaatttgactatttagacatctcatgtgggaagtatcaaatttatattttagggtctggtttactccccttataatgtcttcaggattacctatgttgtgatgtacgatgagtcttctttgagggatgcaggaatgggtctgctgcttagcatacaccagacaagtaccctgctgctgagatatgttcccagcctgcttttcacgttgagaaagggtctcactaagttgctgcccttgaagttcctctgtaacgcatacccacctttgcatgtgggatcctgctgctgcttcattttctagaacagctgacttatagcctgaaaccacagggcctcacttcttactttttttatgaacattacttcactgtttctacatagcacactttctttatcccttctttgttggttcaacatttagatttctatccccatcttagccattttgaataatcttgcagtgagtacccacatgcagatagctctttaacatattactttgttttgaatatatgagatcaccagatcacatggggaaatgtttaaccaagtcttttgtgccccccatcttatttgtttgagtgtcattgttcttagcgtttggactgtctggtttttgtatcaagtatttagtttgttttatgagttaccttttccttctgttgatcatgtgtagtggtaaaccaaagtctgatggccttccatttgtctttttgtttgtttgttttttcgagacagggtttctctgcatagccctggctgtcctggaactcgctttgtagaccaggctggcctcgaactcagaaatctgcctgcctctgcaagtgctgggattaaaggcgtgcgccacctcgcccggctcttttgtttctcagctacttcttgttgctctcaacactattttttagtatacatttcattctgctcctggattacatttatcccaagtattttattcatttttataactatgtatttggtttttaattttgtatacacactcctgtggaggtcagaaagagagtgttttagctcttgtgaccagaaaccatcagctagttgataaccaaactcaggtcttctgcaagggtgatgcatattctctgagccagttcctcagcccttattccattcctttcgatgttcttatgagtgcagttccccccacccccttatttcttctttgtttctttttcttgttctttctctggcattttagaagtcccgttattgagaggatcctgaggaaacgaaggtccagtgacaggcccaaagaaggatccagctcaaggggagatcccaaggcctgacactattactgaggctatggtacactcacaaaaagggacctagcatgaccactctccagaagaaccaacaagcagctgaaagagtcagaggcagatatttgcacccaaccaatggacagaagcagctgacccctgttgttgaattagggaaaagctggaaggaggaccagcagtctcaattaaccctgacccctgagatctctcaaacactagaccaccaaacagacaacagatgccagctatatgaggcccccaacacacacacacagtagaggactgccgggtctgtgttcattcagagatgatgcacctaaccctcaagagactggaggacccagggagtttagaagtcatgtggcatggtggatggggacatccatgtggagacagggggaatggggaagaggtatgggatgtggagcagtaggagggtggacaaggtggggaaataaaatatggagtgtaaaataagtaaataaataaattattaattaattttttaaaaagtctcactatttttgttcaggctggaaattggtcatttcagcctcctggagctgggactgcaagcatacaacactatgcctctttgaatgtatttagggttcagtgtacatactgcaacttcacaagctcttttgtgtgtattttccacaaacgatgctatcacttctcagcttttttctgatgcattccttcgtttcttctctccctttctcttgtttgtgtagtttctcttgcactgtcttctaggcagtgtggtgagtatccatgggaatccttgcctttcttgttccagatcttagagagaaaggcgttcaggcttcatcattgagtgagttaactgtgggcttttgtgatgatgaacaaatttgctatgatgtcaacatttttaaggactgcattcttaagggcttgaaataaagaatttttatttagcccaggctggagctcacattcattttgcctatacccctcccccaagctctgggattacaattgtggaccatcttgcctatgtaccttaaagaaactcatttaaaaattaaatgattccttcatagtagccatatatcacgtgttcagtagctacttatgcctaatagctactatattggacaatataagaagcatttctgtcattgtcaaaagtagtctgatgtcagaaggaaaaattcatgactatctttttctgtgttctgttttatcatcggaatcctgagtcagccaatgccacttgtaaatgttctacaaagaagtcatctgggtccttcatccagctttcctaatgctcacatcttccataactaactctcatcgtcagtgtttcaaggaacgtcccttttctgttccaggatccattcaaggatgccccttggcatgtggttgacatgctgctgtggctttcctctttaacaaccttgacatgtatggaaaatagtttgtaggccatccatcagtttgagtttcttgtctcttgtggttagactgaccgtgtggatctgatagtagaattccatggagtgatgctgtcttcttggaatatggactccaggcttgtcattattgatgttaagctgatttgattgtctcttgaagatgggatctgtcagtttacagggagcactgtaaagttcccttttcagtgcagtattcattagaaacatctactagggaagcagggcctgagaccctttcacgtacagccttccatttgccaaagcaactgccagaatcccttcagttgttcaaatacctaacagtcttccccctaggcctgcctcaaccctaaaatatatacactgcctcccaaggtcaccaagttaaactcccaactcctaaaacataaacctaactaaaacataaacctaaggggacaaataatcttcaaattgtagcacactatttatacaaaagtcacttttaagaacatcatagaactaattgaaaatcagaataatacaggttttcaattatgacattggagttgtttctcaaccttttggctaagaataagtacatgtgacttcggatattacttcttgagctgaatacaaaaagtgtaatggcaaagactaattaattgtaagacagaagatgcccttcagagatcagaagccatgccagtgagtagaaaatgagtgtaacagaactaaccaggagagacttagtgtccataagatgcaacgaagttccagaagtcagtaggaaaaaggagaactcagaatataattagtcccaggacagcaccagaaattattcattagaagataatatctattaaactaatgaagagctgctctgctctatcagaaaaatgcaaatgaaatcagcagtgaggtgccatttataacaattagttcataaaaattgttaatgttgtccaatattagaagtaataactcttacatactttagaaaacactttgatattatttattaaaactaaattttttatttcccactgtctagaaaattttgttgctttcaggctttatatttaatatctagaacttaatctaataaactatgaacaagacttctgcacaggaaatcataaacataattgagataagtggaaactgaaatagagatgaatttttaagatcgctcttgattagaagcctcaatattataatgactcaaatttgtcagctttcaaattaatctgtagactcagtgcgattctaattaaaaacctaataagtgatatattcttagatgctcttggaaatttagagggatgacagtagccaagaccctcttaaagacatacatgatataaggaattcatttactagacattggttgtttcctaaagttgtaataatgacatcataatatcaggaccatgaaaatagtggaaccaaataaagaacttagaaatgtaacaggcaacttcagttttgaataatgtattaaatgtgccacttcaataaatatttaaactataaatgaaaatgtattctattctttcaatcaagttatttacgtagaagtcagagtattacagttgtaaggtcagatgtcagttcagagtcctcaaatgtttgtctcacaaggattcttcaatcatccaggctcttaagtatctgtaaaactacttcccaggatcatggtaagggttagaaataccaggtgtaatcctgcatgtacgtgttgtgcccttgatagtgggaatctcatgtacgtttcttggaaacacaaaaggtattttttgtttgtttgttttttgagacagggtttctctgtgtagccctggctgtcctggaactcactttgtagaccagactgtcctcgaactcagaaatccacctgccttctgcctccaaagtgctgggattaaaggcgtgtgccaccactgcctggctacaaaaggtatttttattcttgaacatttcatgattcacagatctgtgtgcattatggattattatgcttatcatttaagcatttcttagcaccattgccattgaatttttaagttccacttattcaaagaacctcttcaatgatgatttgttttgggggattttgtagaatccctgtgtcccttaaaagttctccggaacaccatagcattctaaaaacgaaagcctttgtgtcattgatattctaataagccctgttataattaattacaggaagtgattagaagattctgctcttgagctgattgattttttcacttcaaaacaaatgcttgacaaaaatagtcaaatacaaatcgcatgggctgtctccatccagggattcaaccatctgagaatcaaaagtaatttttaaactttgtttataatgagcacatacatcattttgtatcattctccaaacatagtgtaactgctctttatatagcgcttgtttgagttttctattgttattgtttttaatctgatgtgtctgagtgtgtggcctgcacatgtctgtgtatcacataggtgctggcatcaccaaggccagaagagggcatcgatctcttggtactggacttacaggtggttgtgaatggccagattcagttcctagcacccacatgcatagctcacaactgcttgtaacacaggctctgaagatccaacatccttttccagcatctttgggcactggcaggcatgtacacatacccacaaacaagcatacatatgattaaaaatgaaataaatattttgttcaaaaaaaatcatttcagctaaacagtgctgataatgactaactgcaattttttttacaaaggaaatgtgattgatctacagtcactgacttagtataatgttctaataaagacagtatgactccagattacttgcaatgagaagtatcaagtgttgtccatctgcattctatcccaagaatacttagcatggatctgatcataaggaaagcctcagacaatgtgcactgacgagtatttccatgagaaaatggcctagaaccttggatgtgccactctgtggaagacgttgtcaacagaaggcatacaggcaaggagaatactcggtctttgatttgaactacatccaaagatcttaaacggaagagacaagctgcagaggactttcttagatgattggaaagaatttcaatagaactgtatgtagcactactgtagtaatttgtatttatttagggaaattcattcagtattcggagaaatgcatcggctaaatgtctgcagctaattttctaatgtctcagggtaaaaggtccatgtatgcaggtgcatgcatgttgtataaaacatgttacagttaattggcaaatggaggtaaattgcccaagagtgttcaaatattttattttctgtaggtttagtattttccaaaatacaaaattacagagagaaacacgtttttaaatatagcagtagtgacttaatgacattaagtgtgcttttcataccttctgtggattttcatagactcttactcacgtagccagcaggcatttttctcctgctcttaagattaatttactaaatttcaaatgcaggaaaaagaggtatctaagtgggatttttctctttctatttatttacttagttttagtttgttcagactaggtttctgtatgtaacggagctttggctgtcctgtacgtaggctgaccttaaactcacaaagatctgcctgcctctgcctcctgagtgctggcattatgttgtgcacttccacacctggcctcatttcttaaagcaaaactcaacttttaatgcattacagacagttgattgagccaggcagagtggctcttacctgtaatctcagcgctctggagactgaagtaggaaaattgctgcaagtttgaggccactgtgggtaacaaagtcagaccaagctttaagcaaataaaagccaggaaggaaagaaaaaggacagggtggaacggggctgcaggaggatgtttagctgtctgcctggggttctgtttgtagctttgctcatcacccagcacaggagcggatctagaacagcccttcttaaatgttctcgaatgagaatgtccaggctaaatccctggtgccatctcttcctagctgtggtctttgagaagccatttgtcttatgtgtcatgtgtcggtgtccttagtatctaatgagattaaagtggtgcctttccccccagggttttagttttagctaagtgggtaaatatatgtggaagacttggggaagagtctacctagcccacgataactgtcaagattatagctgatagtgtgacactatccttactgcttacttagtgctggacatttgactctcctgtacacatacatcctggactatgcctgcccctcactaactctgcaataaaacacttggttaaatcaaatttattcatctacgttatgggtgggtgggtgggtggatagatggatagagagatagatcattgattcatcctttgggagctaagttcttttatactcttgtgatttttcttttggagttttgaagtctctcatcttcctgtttctgtcgcctctctgtgatcagggtgacttatatacatgtgtctcctcgtagcgctaattactttgtacagagtaactggtcagccacccattaactcttccactagtgtttcatgccgtgtctgcttgccctgttcgtcttgaggaccttgcttttgagacccttcattcttctgctctaagcatcctcacagctctaaatccccttcgtgtcagatctgtgctaagtgttccattgcaggactcctacgtacatactctcctcatttaaatgtgttggtttgggtattggtttgttttggtttttgatagcttgcatttccccctcactcttctttctgagaaagaatacaggaagaaagagtctctgaaacctacatgtctaacatttcacttcctcattcatgtggcattctaggaagaaatacatctcttctggagtcttgagatcgttgctctgtcatattttaacagtaacttcttttgggaagtctaacttctttctccccctccttcagcctttgtagttcctctgcctttcccctagcgtctgtgtgtttctaaagaattcatcataactgacaacagcgtaggggttgttttcctcattatgctttttagtttatcaattcctataaatttattgctattctggaaagtgcttttcatgaaatttaacttccttgggttaatctctgtcccatttttttcctttgcggttattctctccaccaccacccccccccccacacacacacacacacacacacacatctgttaggtagcaagacaggaaggtcaatgaggatggtgcttttactctctgcaccttttggttagtagtctaactttcatcggttgctggaagggtgggtgggtggatggacagacataagagcagtctcccactctctttctccttctttcccctctctcacagtgagtggacacaggccctccccttgcatcctcctccctgtttacttccatgatttctgctctgtcgcgaaatacagcagggccttttggtaccagaaggcttagtgctgtgtgagtgtaagagctatgaatctctcactctgggattcactggaggtttctacttgtttgctttgggggttctgttgttgaggttgtttttaagagatgtttttgtacatagaattaatggtccttgtcctccttttggttttttgtttttgtttttttcagtaggaaatgaattaggtggtagccattgtgctaattatctggattccctcaaccttaccgtatttttttaaactatgcactgactgttttcccccattttattctgaaaagacttaattttagaaagtgttcagtgattactgtccatagtggcactgcctttagtcaggacgtaagatgcagaggcatgcagttcaaggccaccctggtcttcatacagagtcccagttcagccatagctacgtagttaagagagatcctacgtttaaaaagaaaaagtgtggcaggagagatggctcagaggtaaaaagcactggctgctcttccagaggtcccaggtgtgagtcccagcagtcacgtggcagctcacagtcacagggaatctgatgcccacacaggcagatgtgcaggcaaaacaccgatgcacatgaaatagaaataaatgtgaggaggagggggagaagggagaggaggagaaatagtgttccgtgagtatcctcctggacttggagggcactgcactcacgtgcacaggaacacgtatgcaaataaatgaggaaaagaaatgctgtgaagtccaataaaaataaagttgggcaatttttagtgttgtccacaattctttaaggacaactccttatattagaattataaatcataagagtgtatgactaatgaagaatccttgagaactgtacagatccatttaaaagcctaaagtccggtgagcagtgtagaaaccatggcgaatccaaagtctctcggaaggacagcctccgattatctaccggtgatggctgttgaaacaggatcatttgagttcctttataaattctatatttaatgaaccatgaggcactatctatgtcatcttaccgtgctgtattgctctcagagttgctaatttatgtcttccatgatcattttttccctagctgtctcattgattgtagaataatggcaggggtctttgtgaacaagcgaacagtcagtggactgacaccccagttcctccttaaaccattagttatatgaccttacaagagttgagtaactttttctgagttttaatttgacttgcagatgacaaggctgatatatcacagtatttttagctacagatcactgtttcaatgggaagtaatttggaaacctaaggcatgcccaaataacagtagaactgctatggttgggctgaggccactattgcaagaaaacatagtctcatatttgatccagataagcctagagattcccatagagcaagcagcaccatcggcggctcttcggcagccaccgcagccctgccgtgttgatagttccaggaggacttttcctgccatcttatgaagattatcatatcttggcaatgaacaatggatggatttggttgaagctggttttttttttttttttttttagccatttgttttctgtaaaaaaaaaaaaaaaaaaaaaaaaatcacctagaggactttggaaatgcaggatgctgtttcctatcacaaaagtttaaatttcattcggctacataatctcattttaaaaataacttcaaatcatataatttagcaatgtctataaggcaatatctaggtaatacgttttctgaaaaatatttaattggcctccaaaactttgagtgtcatgaagtgaaaagctggtttgctaggttttctgtcaaatgtcaagagtgtgtgctggctttctgtgctactgttttgagtaggttgagactaacacagccacagtcagcaataaagaaattattcatgtctaagaacaccttctctctatgacattctggcagcacctaagaggaaaatgtcagaggcaaagtaagtacgtttactgacagtcttgttctttcctatgttcctgaaagtgatataaaatctgccttttaccaaaagtaaaaacactggtcactcacagtgataaacaatagcttttggcttagtcgttttccatttataaagcgatactttcattaaaaaaaaaaaaaagacaaacctcaaagagccaaggcagttatccagaatttatgtcatttttaagctcagaattttaaactaccataggccccaaaagcaagagcactcactgataaagggcatttgccatcaagcctagcaacctgagctcagccagaccctatagaagttgaggactaactaccacaggctgtcctctgacctccataagcctgctgtgacatacatgacctcacacacatgcacactgtcttagtcaggccttctgttgctgcgacaaaaacaccatgaccaaaaaggaagttggggagggaagggtgttttcagcttatacgtcctgatcatagtccatcattggaaagagtcaggataggagctcaagcagggctgaaacaggagatgatgcagaggccatggaggtgttgctcgctggcttgctcagcatggcttgctcagcctgccgtctgtaaatgggctgggccctcccccattgatcactaattgagaaaatgccttacagctggatctcacagggacatttcgtcaagtgattctagcttgtgtcaagttggcacatacacactaaatattttttaaaacctgtagagtcgtaactggggataagtcactagtttgtgtttccacctcaatgaaatagtcatttcactgtgggtaaggacactggtgttctccatttatatctttgtttttctagcactgggtcttaccctgtagcccaggctagcttcagatttgccctaatcctcctgcctcagcttcctgagtgtttggattacagtttaagtgaccttgacagcctcagtttctcacagagtttcttatgctttctcatcaggtgtaaaacttcctaatttttactgaaatatcaaattaattaatgttctatgaacttagaactagtttcacttctggctcattgagatttttccctttgtggattccctcttcagaatcccaaacttttttcaaaaatgcaacttttatattatttattagttctaaaagtgagattttttttaaatcagctatggacacagtctaaatgttcataagcaggaacccattgtgatacagtcatacaatagcacattgtttgtgtggggaggccagagaaggtcctgatacatgttatcttgtgaatgaacctccgacttattgtgtaagtaaaagaagccaaacacagagcatactatttcaggccatttattgaaatatccagaatagctacatctattgaagcagagaagagagggtgtttcttgttattttattatgtttttctttgtttttactgtgctaagttgtatatgctagacaagtgctccaccattgggcactctcagctgtccatactagacaagtgttccaccatagagcactctcagctgtacgtgctagacaagtactccaccactgagcactctcagccccttaagggtagcattttctgaatgaggaaatgaataatgattgcataaaattgtggaaataaggttatatcatatgaatcacttacacaacatttacctgtattttgtaaagacattgcatttaaaactgaactaaactttaggaaaacttggaatggaagctttgggagtcctctaatccagtctcctggctgtcttttaaaaatgggggtggggaggggactggtttttatgaagattgaataaatttctgattatacagtagctagcagaccagaatctgattatacagtagctagcagaccagtattaatatctctaacatgtaagctttgagagatagggactaagtcacatactcttttattatatagtcttttttatttgcttgttttgtttgagacagggtattgctgtagaactcagctggcctacaagctgctatttagagcaggattatcttgaatttgcattagtcctctgtctctgcctccagggtactagaattacagaattgaaccaccttgcccaaatattatatgtttttaaaaactaaagacaaaatttaggggactacactgctgcaagatttacttttaaataaaaataaagacaaagagtagaatatagagacagcttcttcagtaaagttcttactgtccaagcctgagaacctgagtgtaagccccagaacccacaaaacagagttgaaagtggtgacaacaacctcattaggccagccctggggagggagagacaggaggttccctggggctctggggctgggcaccagcacagcctgcttggcaagcataaaaggtgtttagtgcagtaatctgccataaaataagccagagctggaactagaagtgtgacaccttggcaaccaaaggctgtggagaaggagcactggggacacagcctgaagctagggccttgtatgtgtcagcagtcactctacaggtgcgccctatatttaattctagtccactcagacaaggtttgtgaaaccaagtttatacctttcatctggcctaatatttcatttggcctagtgtcccacacttcagctcacgtcactctcatgacaatgtcacccacttcagctcaggacactctcatgacaaagtgtcatacacttcagctcacgtcactcttatgacatagcatctcacactttagctcacatcactctcatgacgtagtatctcacacttcagctcacatcactctcatgacatagtgtcacacacttcagctcatgtcactctcaggcttatggttttctactccagcctgctgagtgctggggttacaaaagctttgaccactatgttgggttttttgtttccctcaaacagggtcttatcctatagcccaggctagcttcaaatttgtcctaatccttctgtctcagcctcctgaatatttagattacataagtgacatgccagcctctgtttgttaagagtttcttgacagtttttcttaccccgtatagaaaaggccactcagagtgaataagtagagagtaaagggccctgccctttgtgtgaagcattggagggtctgctttaaagttgttttgctttttcttttgtttgagaccaggtctcaggctggccaggctgccctcagactagctgtgtaagctgaggataggcttgaccttctgatcctcctgcttccgcctcccacatacgtacctggattatagacttgtactgtcacgcccattcaaaaggtctgttttcaataaagttaagcattgaatcagagaagaagactgaggtgttgttcagcagcagcacaatcagagtaagtacagaggtgtcattcggtaggcaaagggtccagtgtctaccagcatcacagactgaagagaggaacaaagacaagttacccttggaaggaaagtgttatactcagttgtaaggacctatgaggatttagtgctagctttagaaaataattgttctcacttcaaaataagatgttgggaaatgtaaacctcttccctcccctcccccccacccttcccccaccaatgtcattttttaaaatctgtttatttcaggcggaaagatggctcaatggttaagagcagtggctatacttccagaggacctgggttcaattcccagaacctacatggcagttcacagctgtctgtaactccagtcccagcgtttgacaccacacacacacacacacacacacacacatacacacacgcatacaaaacaaataaatcattcaaaaactatgagttttataaattgtctctttttattttatatgtgagcatttttcctgtgcatgtctttgttccacatacatgcagtgactacagagtccagaaacatgtctcaggtcctctggaactgagtgccaggtgtttatttactgcgtgcgtgcggtgtgagtgctaagacgtgaacccctaagacgtgaacccctgcgagctcggcaagggaaacaaggcctcttatcacctgagacgtcactgcagcccttaatttccaatgttttaatgttctttactataaagagaaaggtacactctcttacttccttagcctagtgaatttcctgtagacatttctcaacataattgttatctacattgttttcagcaagagtgactctgtttttgtgaataaagttctattgtgactcaagcatactcgttattttcagtattgtacgttgttaccttttactaacaggcaagtagtttcaacaggagtcctgaagcctgaaaagctacaagtttattgagcactttgcacaaagcatctctttttattgtcaaatgaagagcatactctgagagagtatcaacggcacaggctttgtttgtgggttagctaggagcccacggggctgattctaagcattcatcagtgtggaccactgtagattatatcagaaagtaagaggatgcctaatgtctggttatcattttcatattttaggaaagtaaaagcttttttgtgtggagtattttagttagtagagaaagactgcagtaatctataaggtacatgatcaagacttgtcgagtgtccgctttgctgaaggcttacatcatccagcacaggcaggtgtggtacctgcctgctatctgcttctcggggccatctcttcatagaatgccctcacgctgctctccagaatgccaccaaatgtacaagtttacttgtgcagcttcatacagagaaaattatttctttttcctcagtgcttgaactatggccatgaatggcttcagctttctcaagtaaaaatagtttacattaaggtattttcttcaaataacttttaattgcccaaactgtacccaagacatcccagagaaaaccccccaagattgctctaggatttttttttttttttttttttttttttgcatcagtttcaacatcaaattggcctaaattcctcggggatgatgttataactagagaatggttggtacttagaaggtagcactttctgaaagtcactgcagcaggaaggagaactgcagtgtttggttggaatgaaaggctggaagggttatgcaaggccccgcaaggtcacatttcccagttgtgtataatgtggtgacttcaatgactttctttccttcaatttatatgtaattttgttctcaaacttgcatcaaattgttaagatgttactcattaagttgtttggacctacttgctacaaaacagaactgttaggcatttgctaggataccgtgaaaaataacagactgtaaaggttctgtgaactaaggaagtttcagatcctatgaacgcaaaggaattgcctaactctaaaatggatacacacttccataaatacataaaaatacatcagtctttaattttcattattttcaaaatagcacttcagtgacagaggaatgcatttaaagtcttaaaaaaagaaaaccctcagtggtgctgtgctctgtgctccaggagactaatggatgtgctccccctttaaaggtggtgaggaatgtgcgacccttatgttattaaggacataagatcagttattcaactcatgttgcctgttttggaagttcagagagcaatgagtagatctgtttgtggggtgaaggaaggctgaagacctggaggtagcagtccaattctaagaggtcaagtaatggacatttcatggaacagtataaagactgaagatttgtttgggagagacagatcactgtgtgtgattgaagtatggacagatgtgtggaaacatggaggccacagctggctggctatgtaagttggagcgctgctgtggagagttgagtgctgggtgtgaggcatttggatttaatttactaggaaaagaagaatgattggggtgattaatctgtcagcagaacatgggatgattaaatcaaggagagagaagaggcgtggcgagcttttggaacgggaatgatggggtttgttttatgtatttatatttcaaaggggctcagctaaagagcacatttttgtttagcattttaactgagggctgtaaaaagaacttgtcattcctaagggaggggcactgtttatatttctgtggtaatatattaatacagtgtaaacatgcttaaattcatactcttgatatcttgcattgtgttgtgttctgatttaattctttcagccttgaagttttattattcccaacctaaagatgagaagagtaaggtctggagatgttagactgcccaaagtacacagttagtaagggacagattggcaaaacctaaaattaagcatactaggaggtctgggagttacttccacccacaagttcaagagcagtaaaggagaaggaagagagagaaggaaagcaggaatcctcagtttcaatcacggaaggtggagtccacctgaggtctcactcatccgtccctgaggtctcactcatctgtcccctgatgcctcactcatccatctcctaaggcctcactcatccatcccctgaggtctcactcatccgtcccctgaggtctcactcatccatctcccgaggtctcactcatctgtcccctgagttctcactcatccgtcccctgaggtctcactcatccgtcccctgagttctcactcatccgtccctgaggtctcactcatccatccctgaggcctcactcatccgtccccttaggtctcaccgagctgcagtcgctccacctggttacagtgccatttatgttatttcttcataccattcctgatccctaacactaacttttgaaaactgttgtagattttttatataaaactctttttaagatttatttatttatttatttcatgtatgtgggcacactgctgtcttcagacacaccaggaaatggcatcggatgctcattacacatgattgtaagccaccatgtggttgctaggaattgaactcaggacctctggaagagcagtcagtgctcttaactgctgagccatctctccagccctatataaaacatttaaagagtatttgtatgcttgatgtgcacacctaagttccagcgcctgcagaggccagtagttcaatcccctggagctacacttacagacaagtggttgtaagctcagtgtggttgctggaactaaactagtgtccactgcaagaacggcacagctctgcggtgctgagttgtctccccagactctgtggccgtgtgtgtgtgtgtgtgtgtgtgtgtgtgtgtgtatacatattatttcaaggtgtgtttcagtttggtgtacatatatttccccctcaaacggattctaagatagcttgtattctcttttccagcaaaatgagcttaaatatccacatatgttgccctcctaaaatccatgtttctttgacaacacttttctgcctcttgctttgtctttgctttggttgtttgggtgttcatgtgtttatatttgaggaacttacatgtgatcaaagaaaactggcttcttcattgatggtaagaatggtctacttaaagttgctggtattttagtccttgtaaagatttagatatttgagaaatggatggttgtgttcgtgctttctacgctctgcagaggcagaaagacggagggagctggttcccttctgttcccgtgacacaacatgttctgaccgctgtggcagacctcacagccatcactggtgtcttcattgtagttatttcttctggcggctcagttgctgtcattcatgtgaaggactgcatatcatagtatcataactgcaaatggtttatgcattatcttaatggttgtcaaagccagtgttgtccttgcagcagcaatgaactatggcttgtcataatttgtgtttgatctctcccactcctacaaggaaacgtattttactctctgggagattcacagaacatgtagcagccactaagaggagaaaaacatgttatctgggtgttgggttggttatttttgacttctaatttattcactctcacaaccctgttctccaactgatgttactatggcaccttagttacagcactgaaaacaggctaattatattctttaaaacagacaacagtggtacatcttgagacaggcatctggcactccgccttcttcccgctgtagcgctagtctaggcttcctgggactctgttgttcttttttcttttctttttttaagtatacatttttttcgttcccttctgtttctgtaaatagtggtttatatttactaaagtcactaattgcacatttagcttgttcctttttgagccttgtgcaagaagaaatgtagaattatcctcagccgtttatctgtacttactcttgtttattgaattaatattctcggtatttataaatgtcttctgactgtgtagatattcatttcaatcgaacaaactaactctggttcatctccagcataagtaaccatatcactaatttttaaaataaattagcagcagcatccagctctcttcatgaatcccttctcatcgtttcttttgttttgttttgtttatgtttttcaagacagggttttattttagtgtgtagtcctggctgtcctggaactccctctgtaggccaagctggcctcgaactcacagagatccacctgcctctgcctcccatgtgctgaggttaatggcatgtgccatcattgccatttattttacattgatattatacagtttgtaatcacactaacagtacatatactacctttgtcatgtttgattaaacacatatggaccatgaaatgttacctttactgcttaactctcatcctttgtaatgtctgcaaaatattccctacaacagcctttttcctctggagatgctataaactacatttgtagtttaaatataatagcaacattcaaacatttttaaaaggcagggtaataatgtatttcattgtaacataaaatgtcccagctaagggtagtctgtttcttagggttttgctttagttttgctttgggttttgtttgtttgttttgacctgctttggtttgactactcagaaacccacaagctgaaagcacaggtcaaaatgcagtgggtatatnnnnnnnnnnnnnnnnnnnnaatgccggcatgtatttgctttaggactaggtaggcacagatgagactcagtattataaaatgacatcgtttgcttctgccctcctaggataccctgatcagtatttcatgatagcacaggcaaaggtctcccttcccatcccagtttgtcttagtatgtccatttagtcagagtcactgtcactctgtatacttctatgttttatttctggcaaggtcttgtttagcccaggctggccttgaaacttctgtgaacatggtaccatatttgtgttcttgaaccccctgcttcagcctattgaatgctgggattgcaggcattcaccaacacccctattattctattttctttgaatcaataaaaacttatataagtgtctgtgtacacacacatatatgtttcatacctcaaataaccgttaatggatatcattctgaagcttacattcttaggtaaagacattttaaaagaatcccaaataatgactctgaagtgaagtaaatactggtgaagaaaaaaattgtttccctttgtctttgtatatttcattttttttaactatatttaaaataccctgagaaatcccttagagtggttaagatttctaggcagtaaaccaagctttgctaaaatggtcttctaccccaatcttccctttttttttttttttttttttttttctctccagacagggtttctctgtgtagccctggctgtcctggaactcactttgtagaccaggctggcctcgaactcagactctgcctccagagtgctgggattaaaggcgtgcaccaccacgcccggctgcagtgggtgtatttcaaatacccgatcttattgacctctctcctaggcaggcctgtgtactgacatgtaacagcgcttcccaggaggaagtgacatgttcaaagtcatgagcatgtggggagatatttcagatccagcacagaagcaagttgtcaggactagagtttgttgactactccctgtgtgtattttcagatccttcctaagtctgccggttactcttcggcagcattctgtatgctgcttcaggctaggactgctgctcaccgagaggactctggcctaaatgtggttggccttgaaatccatcccagctccacctttcaacgccttannnnnnnnnnnnnnnnnnnncttattgacctctctcctagcaggcctgtgtctgacatgtaacagcgcttccagggaggaaagtgacatgttcaaagtcatgagcatgtggggagatatttcagatccagcacagaagcaagttgtcaggactagagtttgttgactactccctgtgtgtattttcagatccttcctaagtctgccggttactcttcggcagcattctgtatgctgcttcaggctaggactgctgctcaccgagaggactctggcctagatgtggttggccttgagatccatcccagctccacctttcaacgccttaaacattgttgattgttagaaaagagccactgtctatctacattggactttactaggaagttcaatctggggagatgagtcagactggccaaaaagggccaggacatagcctaggaagacctcagactcaaaacagaacatcctgcccagctatttctcaggttctttacagagttgatgtatttatttattttatttatttatcctttgccacctttcccagtcttcggtttgagtgagcgaggatcttaatatgtctaagacagtatttctttagttctgtccttggaaataatttcatacttgagaagtttgatatttacttttcttttgttatagagtctatatttaaacaaaaaacttgtgatcaaatgagaattcatatggctatgtgtctggaggtggggataaactacaagcccctagcaatcagccaagctgagtgtttgcttgttctttatgtgaagtgcagaaggatgctgaaccactcagctaccactgcatacgtcttaatgccggcatgtatttgctttaggactaggtaggcacagatgagactcagtattataaaatgacatcgtttgcttctgccctcctaggataccctgatcagtatttcatgatagcacaggcaaaggtctcccttcccatcccagtttgtcttagtatgtccatttagtcagagtcactgtcactctgtatacttctatgttttatttctggcaaggtcttgtttagcccaggctggccttgaaacttctgtgaacatggtaccatatttgtgttcttgaaccccctgcttcagcctattgaatgctgggattgcaggcattcaccaacacccctattattctattttctttgaatcaataaaaacttatataagtgtctgtgtacacacacatatatgtttcatacctcaaataaccgttaatggatatcattctgaagcttacattcttaggtaaagacattttaaaagaatcccaaataatgactctgaagtgaagtaaatactggtgaagaaaaaaattgtttccctttgtctttggatatttcattttttttaactatatttaaaatacnnnnnnnnnnnnnnnnnnnncccatcccagtttgtcttagtatgtccatttagtcagagtcactgtcactctgtatacttctatgttttatttctggcaaggtcttgtttagcccaggctggccttgaaacttctgtgaacatggtaccatatttgtgttcttgaaccccctgcttcagcctattgaatgctgggattgcaggcattcaccaacacccctattattctattttctttgaatcaataaaaacttatataagtgtctgtgtacacacacatatatgtttcatacctcaaataaccgttaatggatatcattctgaagcttacatttttaggtaaagacattttaaaagaatcccaaataatgactctgaagtgaagtaaatactggtgaagaaaaaaattgtttccctttgtctttgtatatttcatttttttaaactatatttaaaataccctgagaaatcccttagagtggttaagatttctaggcagtaaaccaagctttgctaaaatggtcttctaccccaatcttccctttttttttttttttgtttttttttttttttgtttgtaatgaatgaaggtatccccctgtgtttttaattctgataagcattttttccatctgtaaatatgtaaactgacttttgagttgtttacagggagagacacacagagctaactggataaacagacatccgtaactacaaaatcccaagactttgctggatatatagagtgtttttctaaagcacacacatatagactcctgacttacttgtattacaaacctaacatgaacagaacgattcgttttgtagcagtactgttttgactcttggtcgtgcggtaggctggagtacgcgcctcagcaaaggttataaatctgggaagaaaagttatggttggcatacattttaacaatctttgccatcttacagcacaaatcccaacttgtttaaattgtgaatatttactttacaaagtaagagattgttttaaaatgtaattaagttgtccgtgtactacttatttagaagctaatgttttttgcctatttataaaattcacaaaaatcaaatatatactatccatattacaatactattatgttatatattctaaagtaaaacacatagatttggaatcaggccaaatttagactctggaggcatactgttctgtgacttaaattacaatcatatgtatttgagcagagatcaaattttcagtctgaggctggggagaagcctaattatttgaccaggttactatttatatagcccattctgtggccggctgtggttaatccacagctggcagaacgctagctcggggaggcttctatttcatgctgtaacagtttgaagaaaaataagagagggaagctttaaaactcttctcattaaatgaaggactaaaaaagcaaatatatacatactactacagagacttgctgtagaaaccgcttcatttaattctcttagtgactgaaatagcaaggaacgcagctggggtgctgatagttttcaagtggcatgtgtctaaagaaaaaacgttgggaatattttttaatagtgtttcaaacattaccttttagaataattgaatcgtggttaggaatagcggcatggagtttctaaatgtgaaaacattatgttattatggtaagaaacatcatttgtggtagccattgcaaggatcgtggctggtgttcatatgacactgcaaatctatttggcaggctttcaggggacacaggaacatttagaagtgaagtctcacagccttgggaaaactattttatgtaaaattctgaagaaataatcttttacagaatgaagattaggcaaagaggatatgatgtaatatctattggtatcaagtgacatgtaaggaaatagcattgaacagaccttgtctttctggattctttttgtcctccaggaatgggacaggactctagagtgaggttcttgtggcctactttcttgtaaaatgggaacttcacacagaagtaccatacctctgctcttttctcctctttccaaggtaccatatcttagtgtacagtgttctaagccccaacacaattgcagctttaaaagtctcttggtttttctgaatgcataagggcaacaaactgtgctcacaattggattctaatacaagtgaccgccaccacaaaatttattctttcagaattatgatcaacctgacatatgaaagtaattgggaaaagattctatttttctctcttcaaagttctgtatcctcctatgatgtaagtgactagcctttcaattacaagttgatactttataaaactttgtaactttagcttgtttatttaggtggacagttaactttagtttgtttcttgtggaagactgggtctcatttatattccctagactgactttggcttctgcaatctttcaggctcagcctaccaagtgctgaaagtacagatgtaaaagatcgtgcctgggattttcacagccatttaaagccatttcttgcatgttgtcattattttctcttctttttgcctagtttaaaacaagccacacacatacagagacagagacagagacagagacagagacagacacaccaggttctttgctctgattaccctcccttggtttttccttctgtttcttcactggcttgccttctttgaaaagaaggaatggtcaaaatacatgcttaattactgtcctctgaagctaggcctggtgctttgagcttgttatccagcacttgggggaggagaccataggatttggaatccaaagccagcctgagctgcgtggcagaccctgtatcaaacaaaccaacccctggaaaagaaccgacctctcattccctctttcatcaaaatccagatcctctgttttgatttcagaattgtttactaaatgagagtgatgaacagtatgcatgtcatatatttcatagtaattgctaaattggaaggtgttggtccagtggtgcctggtacaccagaactaatcagtagatttcagatggttgtatcaacattcactgattatctctgggcttgattgatattccttaccattgttctctccccagtccttctacccctctgtagtttactctcacagcaaatgcctttatctgtcatcacatcctgtatggccagtgccttcatctctgcctcaccataaccctgaatgcattaccattctccttgtttgccctccatcattctctccttttctgccttgcttttatgtgttctcttattggtccacatcccctcccttggtagtcagaaccacaaccttcttctaacatatttctcatgactcattttcatggacactctgaatagatgttgtgactctagtcttattctggacttttctattcaacaataaaaccagatttttaaaaaatatatatatttatttaaacatcatctttgaattctacttcttgccttttacatcttaaatagtctatgggtttcatacttagaactccagcatggctttctcttacacagccaaaggcagggtgttattagttgttggtaaattgttgctgtcccgtttggctttcttgcctatttctctagtcacactccttcttcccgtacccccatgtgactgttctatgcctcctgactgccccacaaacccctgcattagcacagcctcacagtctgtcactgtgcctggattcgtctcctatctatacctccctaatcaccttctttcacatctgtccatatctgcctgtatctccatccagaaaacattaatgtatatgctaagaagattttatcctgagaaatgtaaataaacagtattttaaaatatggctttcctggcatgaaactaattttatgttatagccctagattattttcttactatttaaaaattataaaacatccaggcattgtggcacacacctgtaatttccagacttctagaactctccagccatcattggttaacgtaggggactagaaaataagatcaaataaatttagttaagatatatattttttaaaactctttttttattatatttttattaggtattttcttcatttacatttcaaatgctatcccaaaagccccccccccccccgctcccctacccacccactcctaattcttggacctggcgttcccctgtactggggcatataaagtttacaataccaaggggcctctcttcccaatgatggccgactaggccatcttctgctacatatgcagctagagacacgagctctggggttactggttagttcatattgtttttccacctatagggttgagaccccttcagctccttggatactttctctagctcctccattgggagccctgtgttccatccaatagctgactgtgagcattcacttctgtgtttgccaggcactggcatagtctcacaagagatagctatatcagggttctgtcagcaaaatcttgctggcgtatgcgatggtgtctgcgtttggaggctgattatgagatggatccccgggtgtgacagtctctagatggtccatcctttcgtctcagctccaaactttgtctctgaaactctttccatgggtgttttgttcccacttctatatttttaagataataaataaactattctcttcataaacattatgtctaaaccaatgaaaagatgatgaatgtttattaaaaagctaggatttcatctacctccatttgtatttctgaaatttaaatgtacttagtattttcttgagtatttttgttttataggttccaagtattcttggtagtgcatatataaaatctaatatgaaatatatgtttcttcatagtaatggcatgtatcaaacatatagtgctcacatgataaacgtttttctagttaaatactgccatttctctgtggactttatattaagtttgtacaagcattggtatttgagtgaatcttgtataatcatctagaatacttacccccaatttaaggttttatttaggcattcataaacagacacccagttcttctttttctcacttaagctgtatggaggtgaccgttctaatttcatctccttttgtcttggtccagggcttttttctcacagtctccccagagtcggtattgaaagtggctcgctatgctgccgagaacaacagggtcttcactttgaacctgtctgcaccgttcattagccagttcttcaaggaagccttgatggacgtcatgccttatgttgatatcctctttggaaatgagacggtgagttgctttagaaagacaaaacaaactaatctaaggtgttgtagtacagtcctttaaccccagcattcaggaggtaaaggcaggcagacctctatgagttgagatcctgtctccaaaaaacaacacaaaacaaaaaaaaatagcttctctgtttaggactgtgtgtatgtttaggaatgcataaatataaatttaggtataatataaataaataaataaattttggtaactgaataagattcactcagtgtacatttctctaacactgtattttctgtatttcctaaagaataacttcttattaaaatgattatttaaagatgaaatcattgggtattaagttacacatagtaagagtcatctcttactctgtattttctcacctctgcagatgcatctgtgacttacaactgtgaccacacctagacttaaaggaacaaaaacaaaaaaaaaaacccttttctcccttttaaaatcttctgtctgaatctatgtaaagttaataaattatgagtagatgttgatattataatctattttactgaggtaattttggaactatttgtatatcatagttgaaaatgttacagtagaatttcacttgaagtgttacagcttcttcttttaaacagtgatgtattttctcccataaatcaggggaaactttaaaaacccacgacgtagaatagcggaagctgtgactgaccttcaagtgatgttagccacatcgatgaacttttatgaatgttcggagtttctgttacattgatcaccctagaatctgcacatgtgcagcctggtgtgcacatgcaataaataaatagtcaaataaataaatgcaaattatgtacaaaggcactaatcattgactgatgctaaagagaagagacttagggaagcaaaaaagaataatccccccaaagtgacttttatctttacagaaaatgtcgatgatatcaaaatggtcttcactttaaaaaaacaagtgtgttagccaaagcaacagtcaaaaaataaaaggttaattagaattaatcaaaaattaaatacttttatggccaagaatatccgaacacacctgaaacacatcactgaggatacagatacaggaggatagcgtgtctaaggccaggttggtacaaagagagaccttaaataacaaaaccaaaagaatggtttcttgcttcaaagaacaagctccagaatacagaaccacaaacacccgtacagttggagagtagttatcaatgtccaaatatataaccccatggcaaggaaaccaactaaagcacatttaaaaaatggccaaagaatctggtcattgggatgcgtcctgttactctggaggttgaagcagaggatcaaatgctgaggccaccctgggctgtgtacagggagacggtcttaaaacagccacacatatatttatacatttgcatacatacattggtcaaaggacttaagtaaacagttctcaaaaaaaaaaaatacccactttacagatggtcagtaaacacatgaaaagacagtcaatatctctgatcattagagaaacataaatgagcctaaaattagacactgcttcattgggtaaacctgatggagaaactgaagcctgtgtgttgcaggttagaatgtgagcttataaaacactcatggaaaatagtttagtaaattgacaaaaaaaattgaacatagaattattaacataactcagcaattcaacttcttagtctgtcccaaaactaaaagcaaaaactcaagggcttacacaccagtgtgtttcaacattattcacaatagccagtggtctcgggaaagcgattatattgatgtcgttggttggtttgttagttttgtttggcttggtttagtttttgagacagggtttctttgtgtccttgttctagaacttactctgtagaccaagctggatttgaactcacagatatctgcctgcctctgtttcctaagtactgggattaaaggtataggccaccacgctcagctgcaaatcaaatttttaatgaggaaaatttcttttatatgtatatacatatatatgtatatatttattattattattattaaacatcaaagaaaataaaccttcatatacatgctttatgaatgtctttaaaaattctgtaaagcttaaaaaggcagatgtagcaaacaaccattggatttctgtacaggcctgggagtgcagctgagggtagagtgactgcttactacaggaagttccagacattcaaacctagcaccatggtgggaggtttaagtaaattcaaaataaacaatggaacagtggatcctagtggtacagggcaggggtggacagtggtgatggctacacacagctgtgaatgtgcttaacactgaattcagcacttataatgataaggtttatcttacacatggttaacaattttataaagattgattctacaagctagtaacattatattatgtcttagtattgattatttagcaatattttcacacctaggagacaaaactgtaagctgctatatgactacatgtcatgttgaacaactttttcttgtcttttgtttgtgaatcctgttcatttgcatttatttcaacaaatattcatgtagtaaagcctattatggcaaatcagtaactaatagaagccaagtcccttgtaaggtctgtcattatatgaactatagactaaaggtggcttcagagcgatccaatgtgttggtattttatgaagcagtctttaaaggacttctgatgagtgcacagctacggagtgtgctactcaatgtgtgctctgcgctttagtggtgcggttggatgcagctgcatttgcatataatacaaagtcaaacagtgcagcgccttaatgataccaagtaagctggatgtcagagtcagatggtttaagtggtaatcagctagaaatatcggctaagatgatgcagtttaatagggataataaagatgatattgtattcgattacaaagtgcaagtagattaatgttttaccttttgaacatattaccattgttctccttgaatactttagtaataagaataaattatctctggttcttaaagaaaccatttttgttgtaaaaatgcactgcaatgtaaaatgtagttaacaagaaatgtgtgtgtgtgtgtgtgtgtgtgtgtatacttacatggtaaatttatatttccccttttcccttcctagtgccccccaatctacttaacattccatttccaagaatgatggtaatcatctgatatcaagcacacttggcttttatttatacgtggttgtccctttcctttttctggaaaggtttggacactagccttgatgattttccagtcgtcttagttaaaaactaagtgctttagcaagacaggcctagcagtgcctgactacagactgaagcatttctgaggcagaagcaaggatactgcatgctgtaggctagcctggagcttgcaggcaaaactatctcaagatgagtaaataaaaaccaggggctggaactatggctcagcctgcacccacaaactgtccctaactcctgttccaaagggtaagatactctcctagacatacacataaagtaaataaataaataaataaataaataaagatttaaaagtagtaaggaaataaaaacaacttgcccagcagccttattcctccacagacagtaatcagtgatccccctgacacaagtaaaaggcatgcttgcacactgggtctctgcctttccaacgctctgaccctttcatacagttcctcatgttgtcacccataaccagaaaattattttcgttgctacttaataactgtaattttgctgttgataagcactgtaatgtaagtatctgtgttttccgatggtcttacgtgaccctgtgaaagagtcttttgacctcccgagggggtcgtgacccacagattgagaaccactgaggctgtagcattaagaattaagccgaatatccatacagaatatttgatctgggggaactgaaaagctggttttttaggggtcctgaaaagctggtgtttgtgagtgaagaggagcagaaaaggaagctgtgtgtggcggctcagacctgcagtcctgcacttacaagggagacagacttgtttcagacacaccagggctacacagaaggttccagccagcctgggttacttactacaactcttgtctcaaaaaaattataaacaaacgataaagtagagtaagtccctgcatttgacagagtttccaaccttctagcagtcactcttcaattctgactgacagttgaattcataagctagtgaaggaaggatgtgtgcttgtgcatctagcaattggaaggcagaggcagaaggatcaaaagtttgaagccaacccagggaacatgagttcctgtttcaaaggcaagaaaaatgaatgtttggaaataattagatacatcctaagaaaaatagggccaccattgatccagtattctgatgtgacttactctctttattgttttgtagtaagaagtacttaacaggaactccaaatgcagctcggttagtgccatgctggcctggctacagccccagaggcctgtactccgggtatttggcaggtagaaacaaaatcagccgttcttggtcagcctggactatactacacactcctgtctggaaaggcagacagcatggaaggcaggaaggagcagagctgagcatcccgtccactttgcagcgtacagttcactgttagtgtgttggcagtgctgcacaccccttcccatggtccatttgcagttttcccttccccgcaagcagaagctccattcatattaaataatagctccacccatattctgtcttcccagccttggtggccacttgttttgtgtgtcatcaagagcttgcacatactaagtacctcatacaattagcttcatttgataattatctaacatcctcagcttatttcccataatgttttcaaagtttgtccatgttatagcatgtcttagaagtatattgtctcctaaagttgaataatctttctttctcccccaaaatacttcccacccacttactccagggttcagacacaagagtccaccacttgtctgtcccacagccttccctggaattcagcatgcattgagacttaatgttcttttctcaattatggttgattagtaagccagtgtgatggctgatgaggcaaaggcaggaggattgccaagagttcaaggccagcttagactatagatccagaccctgccttttaaaaaagtaagaaaaataaatgaatgaataattaaataaaacaaaacctttacttaaccctattattgtattatatttcccacttttaaatgaaaggcctgagttcataggttctatcgactgaagaagctttgcttcttctctaggatgtaaactctttagctgttatgttttggattaattttttaacatcttcaaagtttaaacatcttctttagcagcatcatttttcaactaaactcacctgcaatcggcttaataaaggccattctacgtgcaggtaattataaattatatctattgatgccagctcataccagctgctttgtagtcattgtctacctgtacatgactaaagaacttgattattcttgtttttcattattattaaattaagaagtttttgaatagagtcattttgaaaatggttcttaagagtaataccttttaaggtttcctaatcactagataattaacctgccaggattaagtacactcaactttgcctcaggatgctcagttctcaaataaggtcaattatctcctgtaatgactactttgtcaagagttaccacttaattccacagtgaagcagcacatcacccagacagtgcactttaagatatttaaggtggtgaaatacagcttgaaattggccagaagagctctgttgaattatttcatacgtactgagaataatatattgcttattagcctcccccttctgggcgtactattttgagtctgacaaatgacttaactttataaagatattctatagctctgtctcatcagatccttctctggtgaatttgccgcactcccttgtctttacagggagtcctgggctaaagcttctgacttcagagtgtagagcagggaagctgaggttgctttctctccgatgcagtcatttcacacgtgctgctttcggtggtaagacagggtttcactccatcccagttggccagcctcagcatccacagtgctagtattacaggttccagtgttcctttctcccttcctcccaagcctccttccctccctctctttctctcagatgtctccctccctccctcttgtcactctctgagtggtttagtaataaatgaatcacaaatcagtggagagaagtctgctgtttgctggtgtggttgttcagttactgagaagttgctgagtcgtttttggtgatgaagctgacacgtgttacttgagacatcagaacattttgaaaaaagtaaacttggctttaggtgtttgatccatatcttctgaacctaaatggtagctttaagacagggtatcacagtagcccaggctagccttgggctcacagcagtcattctgccccagcctccagtcatcctttatgagaccaagtgggaatttgtgagcctttcctccggttttttattgtgtgatgctgggaatggtcagagagttcattaatttttgtttgtttacactgctaatctttaaaatttttaagcagtttcttcaatcctcactaatctgtttaagtagaaagggaaaagaactcagtcggtgaagccttgttagcacaaggactgagttttatccccagaaccttgctagctggtcagttctccgtctaacgagacatcctgtctcaaaaagaaaaggtttcctaaagagcagcaggcagcttgttgcctgcttctaggcagacatatatgcaatcacccgcacacgtttgtcgatgctttgcctacacacattttcattcacagactgtcttttggtcaggattttctgcttctttgtaaagatataattattaagttttagaaactccatcaaaccagtatatattttatactcagaataaactgtgaaataaatggtttctccttctaccaaaccactttcaacctgaatatgaggaatggagctgtgcatagttaatgatggatggaagtcacctttccaagcctgttcatagaaagctctccactcctgatgggagcctgtgatgcagccaaacctaaggttactctaagtgcagccaagaaaatgggaccccttagtgctagaaacttacagtgaatgaaaatgaaatgtcagcacagaacgtagtatctttctaacatgttctccccattcactccctcttactgttcctcctgggccccttgctcagagtagtatgtggggagacacataggacaaaggattaatgtcttcagtctgtagatgaggactagagactcgtggcagccttgtgagaacccttgagtcagagacaccgcacttcccaacctaagtccagatcagagtttctgtgtagtttttctttggctttgttcctttggttttgttgtcattgcctagggatatattgtcaaattagtgtttggctacttaaattatttcttattcctaactactgtagttcttagtgcacaaaccactgctgtggtactgtatgaatgcgggagggccaacaggagcatcacacccatcatccctcacctccctctttcctcatcctctctaagtgcaagcccgctttgtgttggttctcccgtaacccaaacttcaccatgtaactgaagaccaccttgatccttctgcctatacccaccattttatacgatgctggggaccgaccccaggacttcatactcctgggcagggtctctatcagctaggccacagctctaagcatgtttctaaatctcagtaattcatgtgtttctttaaacacagttctttgcttcatagaaagctgcacagtatatataggtctgctttgtacttggctttttttttttaacaactatgtctttatccttccacagcatctcttgcttcttaaagccaaatggttccccattgtatgaacacactgtgtgagctcttaaggcagtcccagaatctcacagtaaaaacaagtctttcctaaacaactgcttacctgtgtttttttattactagaggtactatttcagggtgaattcctagaagtgggaatagtgactcaaaggaacagtacttacacagttttatagatagttccaaattcctctccaaatgattcatatatattttcatacttcaacagcaatgcctgtttctgatttttttgttttttgtttttgcagtgctggagatcaaagccaaaccctttcgaatgctatgcaagaggcctgtcaaagctatgctcctagcgcttatgtttgagtatttgattataaattgcttctaaaacattgccgtcaaattacattcattagaacagtaaaaatgtcactttatttccaaatattcattgcttttatgaaaattaaactgaattaagatgaattttctgttcttcccaactaatttgtttctatatgattaaaaaaaataatgccagatgccaggcagccgtgcggcatgcctttaatcccagcaatcaggaagcagaggcaggcggatttctgagttcaaggccagcctggtctatagagcaagttccagaacagccaaggctatacagagaaaccttgtcttggaagaagcaataatttttattatttattataataatatcacacattacttgtaatatgacatgttataattagcatattattacatctctttattaaattttatattactaaaataatatataattataataatttcatataatatattattattattactactactactactactataccagagattaaaagtgatcatcttagggcattcatctctttttgcttattttttaaaacattgcgtaattatgaaaaaagtccttattctgtgcttgtttaacattctcaccccacagttcatgtgcagtaaatacccctgtcctgcgctcaccccctcagctctacctggcagaagctctccttcccctgctttagatcagtttggaatgtgattgctttgtgtgtcgttataacgtttatgctgttttataattacttttataattataattacttggtcatctgttttctgttgcaaagactatgttcgtccatacactgactttcatacttcactatattcccaccagctgaaaagtagtaaggattacagaacatctaaggagtggaggaatttgcttttcctttttcaaaagattttagtcctttgcacattttagaaaacattagttttttacaaatatgatatcatttagttactactttgtttgtttatttattttcaagatttgtttgtgtagccctggctatcctggaactgaactctgtagaccaggttggccgcaaactcagagatccatctgcctctgcctgatcttaaaagtatttacaatcttaagattacctttttataccaatgattttgtgttttgtgttttccttttaaagtggtgtgtgtgtgtgtgtgtacaccaaggcatgtatgtggaggttaaagtttggggaatttgttcttttctttccctgttggttccaaaggtggaactcagtttctctaaatgtatctctgctttagactgtaataaaaatcctgaaaataatttagatactaaaataccaattctcattttgactgctttatacattcaatgtaacaaaattaagttacatgggctttgaatatttatttatttatgaatttatgcctctttcctttcataaaatagatatacattaggtaagcctttgggtggattcttgaatttgagacaaccctaaagtaaagtgagaccttctgtaggtaaagataagataggaacatatgcatctctgccatttttgaagatttaaaaaaaaaatgaacacaatactctccagacctctacactgtatcattaggtgttaataatgtgtgcaaagtagacttgtgggctttttcctccttggggccttgcttgcacatgctagacaggtgctcaatgactaagacacatctcagcaccttgctttttcttgttcattactcatcactgtttttgaattttgttttcatcctagctgtgtagactgtagttcatttctgacaatcactagtagaagtgacataaaactctacgggtatggtggattgaatttgaaggggccccataggctcatatattagaatacttgttcccaagttggtggaactgtttgggaaggattgggatgtgtgtgtgatcttgctggaggaggtgtgtcacaccaggtagggagtgaaatttcaaaaagcacacaccgttcccagttagctctgaatttctctctggtgtttgttgaaccaactgcaactctcagctactgctccagagccgtgcctcccagccactgtgctccttcccagtgaggctcaatggggctgaggcagcaaagtaaatgcttccctttataagttgccgtggtcatggtgttttatcctggcaatagacgacaggtttaaaagctcaatcctctataggtctgcctctacttaagactccaaccaaactttggaagcctccagtccaccacctacatttcaactaaatacaagttcagggactcgcatgatcctcttctttcagtaaggatcttgtaaactggggttccaggtttgtgcaagccatcaatgtgctagaatgtctcacagagtcaggaaagcacttttcttacagttataggtttattgtggtggacccaactcaggaatcgctaagtggagagatgaataagactagttcagggagggtcctgaacgtacatacagctgcggtgtcttctctctgtggaatagagcacctcagcttcccagcagaaccatgcgatccccagccaagggagtctcaccaagctgcactgctcggggttcttacaggatgggatctcatcacctaggtgtaactgtgcaacaggaccagtgccatttatagaaggaagaatttatttggggattacatgctcacgtttgttacatttatttactaaatgtgcttaatgattttgaccacagtttactaagatcatagtctgtgctgtgcacaaggcactcagacgtacttgagaatattaacattgcagagaacgcagatgtgtctgagcagtcagtgcttgctgctttttctaagggcctatgttaggtggctcacaaacttcctggaacccacactccagggctctgatgccctctagaagacagtcacttactcatcacaatactttttaaatagaagtcttcactataattcacaatacagagctcagctcaggcttggtagtctggtttttatcaaaaacatttaaccagctcttaccatctctggtttcaataactagcatactctacccctatagcgtgaatgtaagaaatacaagatatccaagcttaccagttgtccctatattcagtggttagttttctgttgttttatttctttgttttgcaatgctgagtattagctcaagggctctggcacaatggattctttccatgttttccataggaggatgttgaaattttcattcagaaatgcaacttcctttagggtttttattggctactttcaaggcctcatagataccatctctccactgtcggtcctgctaggtagcccaggctggtctagaacgcatgatcctcctactgaagccccgagtagcacttctgttctatcactcttcctttctaggtataattcgttttgagaaacaacattcggtttccatcattaacctgaataaaaattaatatttaatttgcagtggcttatttgtaggtatcagttctcatttgtaataagtaagaagggtattcttaatttaatagataaatccagcttagagtgatagtttgtagaaaaagaattccctgcatgaggtacaacaggcttcctttctcttgagcatggcattaatacaaaaactgacccctctgttccctgccaccttccaggagggaaatgctgtcaggagtgagtgaattgaatttactccctggtaatcagactttacatctgctaagctggagtcagagtttatccctcatgttatgtagaacttggaattgggccacaagtagtactgcagaataaactaggataacttatgcttgttgcagagaacatcccggtgaccaataatagtcaaaaaaagatacagttactaaacaacattatcccagctgaggagccgatagtgttatttcttaacagcaaatggaagaatggaggtttataaaaactgtgccattgacgttaggagtggggatgcctaggtagagccaagcccttgctagaaatagtctcatctctttctgctcttgctatcagacttgtattaactcggttttcatttttctccttaaatatgtgtaagtgttttgcctgtgtgtcacctatctttgtgacacttgtgttcctggtacccatggaggccagaggagggtttcagaacccttagccactagagttgcaggtggtctgtgagctgccatgtggctgtggggatctaacccaggtcctcgggaagagcagccagtgcacttagcccctaagctatgtctcgagcatcttcttttgttacgtgaaacttcaagatgcccatatgcagccctgggtgctggctgtgtttctagaatcaggcatgctttctttcttattgactagaacaattagaactgttggttaccaacaaggtatgcctgatccagttgcactgttgtcttgttgtgccacacttgtcattgttgttgaccataggtgccgtagccgggtaagactgttggttgcttccttccctcagagctttcatagcatcttctggtaccatgcgagctgatgctcagggaggagccaacatgaccttggacttgtagccttccactggagcatggcaggcttaccagagaccaccttagagaaaactgaagcccctcttccactagctaccagtcaccaataagtcatggtctagaggtgggacttcatgtccacctgccttgcccattgtgggagttaatctggcttgagctcacacaagtctcatttatgccctgagtttatatgtgcagctgccccgctgtgtaaaaggcgcttttaccctgtagtcatccactgcttcgggttcttacgctttttccacagcctcttctgcactgatatctgagccttgggaggagggaatgtgatatggttgtctcacttaaggctgagcatttcagtctcttattctctgcaccttggcctgttgtgggtctgtgctagtccttgtctgctgcaaataaaaacttcccagaataaagttgaaagatactggtacatcattcggagtaggtttaatactgtgtgtatttagcagcataatgctcgtaggttccccactaggcctatggtttgtctagccatagatccttgacccaataatctcaccggatatgagtttccttttgtggagcaggacttcaatccatattggtagggtactccatgatgttttgcgtcattgtggtgccaggccagccgttattgtagttgcagggtacccatctggtaaaatagatgatttccctctagtagcaagcatagcacctttcagcactttgaaacctactcagtggggatgaagcttccagatcagctccaagccagatatttccatgttatgtgactcaaatacatagcatcttcagcaatagggtctttcatcaggttctgtaggatagcaaataacactgacagtaacctctagtagtgtgtgtggccaacagctcccaaaggggtaacccattcctggcactgtgctttttatttcttagcctgtaatgtgtggcaggggtactgtcacattgtcattgcccatctccattttaactcttctaagtatatatgtgtacatatgtgtaagttaggaagcttctatagcagtagctatccatttgacttgttttggaaagtcttcctgctatttatctctctgtattcctttctcttccctgatctcccctcccttggaagtccattctccctgaacccctggagcccttgctaattttctggcctccctggatattctaagtgaaacaaacatgctatctgaagattcacagctaacttctacaagagaaaggaaacatgtttgtctttctggtctgagtcacaccactcagaatgcttgtttctggctacgtccatctatccgagaatggctgagtaacattccatcgtgtccgttgccacattttcaggatctactcattaactgatgcacatctaagctgtttccactttccagcatttgtgaatagagcagcaatgaacactgatgagcaggtgggatacaaagtaggacctagagtcctctaggtatatacactccagagtggtctagctgaatcatggatagatctatttctagctctttaaggacttctagtgttctcccaccatcagtaactgcccctttttcctacatccacaccggcatgtttcatggtttggtttggtttggtttggtttggtttggtttggtttggtttggtttatctaggccattccaactcaagtaaagtgaaatctcaaagtagttttaatttgcatttttgatggttgaggatattaaacttttaaaacagtgtttctcggccatttgtatttcatctgttgagaatgctctggtcagttccatgccttgttttttaattggttgcctttttactgttttttgcggatgttgttttgttcttgttctttgtatatttttggtacctctgatggatgtgtggatagcaaagagttttgtgtgttctgtgggctgcctcctcactcagatgatggtgttctttgctgttcaggagcttcatcatttcacagcatccctttcatcaatttcttggtcttaatgccaactctataagggtcctggtcaaaaagttctttcctgctccagggagttagttcaagtgtattctcttctgtcagcttatgggcatcgtagcttatgttgtagtccttcattcttctatgtgcaaatctctgacttgaccagcaccagctgttgaagctgttgtcttttctccagtgtgcattgttggctgtgggtgtgtggacacctgtgtgggtcctagttcagatgcatcaatcaatgagtccatggttatgtgtggcaatgtttttaatgtttcagtcttttcaagtcttctgttgctgaacagtttactgtttctgtgtttcagttttacacataacagctgggtaagaaaatctttgtaaatagatcttcattgtaattctaatatttgaatccttctaccaagtatttaaatgcttaaaacagcaacaaaacaaaaatcctacagaagaggataattaaatgttaatctctatgattctaaatataattaaaatggaaatttggaaaagtgggaaattgctggataatgaggttaccagatttagtaaacagaagtacaggcatccctttaaatttgaattccagataggacacaaaatatttgcgatatacttgtacaaaaacattgtttcctatctgaaattcaggcttaacttcccatcttatgtgctgaatgggtgtgctgggaatgttacggtagaggtggtggcaagagtaaagaaggcccatgctcgcacagaatggctggagcattcccgcggatgcaagaagggggacctatgtgaaacacacactgcagaatcagtctgtctccggccttcagataaaagccatttactgtggaagccttacaacctgaggcaacccctggaatccagagttgtcctctgacttaagatctcttccttctgtctccctcccatagtcctcctctcattccagttcctgacccgtacacacatgcacacacagacaagcacaagtatatttaaatctagattcctcatataagagaaagtattcagtatttcatatactgagtctggtctatttgtcaattcatatgttagtagacatgttttgatccgtttcttagctgctgtgaattgtacagcaagattcatgtgtgtatctctgtgatataactttgaaccctgtgggtatggaccaagggttctatagcagtggcatctggtagtgctagtttgattatgaggaaccccacactggcttccatagcaccttcccaccacatttctcctctgttatcttaagtgggcattgtagcagcaatgagatggactctcatggcagtttcagcagtttcaatcctcacttccctgatggctaaggatgttggatactttctcagagttttattggctgtttgtattttttgttgttgttctgacacagggactcatgtgccctagattggctttaaacttgttatgtatgaaggatgactttgaactcctaatttccctgctgctgcccagacactaagattacaagcccatgctaccacaccttaattcatcagcctgtctactgactcaatgactgggggggggggggggggggtgtggaatatttagggctttttttcccccagttctttatatttttagtatctagatatgaattccttgatgtatagttgaaagatgttttgttgttggtttttggttttttggggttttggggtttttttttttttttttggttttggttttggttttggttttggctttttcctgttctataggctgtctcctcactctggtaattacttattttgctatgtggaagaattttaaaagttttttttttaatcacatttatttagtgagagagagagtgtgtgtttctgtgtgtgtgtttgtgttgtgtgtacaccatgccgtgtgtttggaggccagaggacaatttgttgaactcagttctnnnnnnnnnnnnnnnnnnnncccactgatccttctcactctcccagaagcattttcatttcgtgtaatcacatttgtaggttcctagagttattttccctgctttggaatcttttccagacattccctgtctacacctatatgttctagtattttacctctaccagtttcagaatttcagctcttgtattgggtctttgatccatgtataatactttctgtgctggagtaagtagcctttgagcatcttgaagttacaatgcctcgttgcatttccagatgtatgacaattttatggtgaagatagacacacggcattctgcagccaggagactctgataatcattgtcttagagtaactgatgtcagagcaatcacttctgactctcccacagtgtccttgctttactctgcccgggaaggtgtagagagacaccgcagacagggcactgacaggtcaaagcagtgattccatacatgtgcaggttggtgagccaacgtgggtatggggagtactcggcactgaggcagctgtggtgtgaagaactccacctcagcacgagtgcatctctcagtccccacgctagtcggccttcccctccagtgcacactatcacctgcagtgctagcctgcagctgaacgaagcaggagagtgtgtcgagcctttaaggacccttgtcccctcctgcttcaaggcgatgttaatagacccagctccttggtgggatctcctatgggtgatcacagctgctctgatttaagacagcaattgtcatgctgttcccagaggacacttcttctataaataggcaggcactgcttagctatgttttgttcagtagtggtcctctgagactagagggaaagtgacagtccttatcatctggtgactgcacaggcatcatagtgaaacacattgttcacttgtttatggagatgcttgtgtaaataaaccgaccaggcattcaaaagtacagcagttctcctgtgactagcccataacttgatgattgcgtcaccgccggcttatgaatttgctgtactgtactttaacaatgactttcaaactgtgcatctgcttatttaaacgtttattctaatacctgaatgtgttatgcagcagcagttttatgtatcttttatttactgcatctctcttttttttttttcttcttttgtggtgctggggattaaacccagggccttttgcatgctagccaagctctttccctctgagctgcatcctcagcttcttactgtctgttgattgcatcgagtgattggcctgtaccttcaggtttgtgtaagtacactctgtgatgtccacaccatgccagcatcaccccaggatgcatctctcagaccataccatcagtgagcatgatgcatgcatgatgcagttccgacagtcccagccacaccatcccgaatgtccccctgtagttgtcatgtcattgtccctggctgttttaatgcagtagcttcttttttttttttttcttttttttttattagatattttcttcatttacatttccaatgctatcccaaaagtcccccatgccctcccccgcactccccctccccctactcccactccctggccctggcgtcccctgtactggggcatatgaagttaatgcagcagcttcttgatgtctgcctttttcattgtcttaggaggtgggggttcagacagggtttctctgtgtagccctggctgtcctggaactcactctgcagaccaggctggcctcgagctcacagagtgttaggattaaagctgcacaccaccaccacctattttattttttatgtagacttccttatataggaagtgtatttatgtagaaatgtgactggatataaaggggcagactttgatggtaaggaacgaagtggaggaattcaataaggctgtctgatcaggttctcctggtgtctgcatgcagagatcaggatcctctatgaagctggggtgctgtaatctgtcaatttttttttatggctaggcctgacagaagcagacagtattagcctaccttgaggaaggggttcagagccacagaccaaagagcaaagtgtagataatagcatctcacatagaccacacatggactcactttatagcaggcggagcgttatacagaggaaggagcactgcccacgttaattggacattcatatgggaaagcttcacccttaccttacacagtgtacagaagctgcttctgtatgaattatatattaatatgaattcttacaaaattatgggaaaatatcaatatggttgttaggagccaaaaaaaggctattaacaggaaatattaacaaaaaaaaaaagtccttagttttagtgtgcttgttaacaatcaagaaaacttgatttacttttttaattttattgttattatatgtttgtgtgcatgcgcaaacacacgtgcccatcctggcatgtgtgtagaggtcagaggacagctactgagagtgcgttctccctaccatgtgagctccagagatgaagctcaggtcgccaggcttacatagccagctcatcagcccctaaaattaaagccttcttttcatcagcaggcatctttatgaaagttaaaaagttgggatgaagggttatgtggcattctaggctgtgtaaagaaatatggttatacataatttttgtcctacaccataaccaatactaaacagagatccctacgtttaaactacaggcagaaacactttcagatcatattcattctgatgtaatgccatttactctgtaaacgtacatacttcagagtaactgattcatgcataaaacatgcacatatttccacattcacttactggataggaggccttgtttttcccccagctgatcctcttaaatctcacttagctgtgaaatacatcacatacctgttaagtaaatcatgaacaggtgctctcacttgtacctgggagtccatcatggccacagccaacccgttacatgggtgctggaaatggaactgaggtcatagggtcacagcgggcacttcaccacctggctccccagggaagtaaagatttgaaagttaggtaacagtggtggacaaacctaaccacaatcattttcttagcccccataatcactgttagttgaaaacttcttctttctttgatttttaccttgtgattttgcgtttagaaaggagtccattaaatcccaagacttcacatacttgtcacagttaaaatagtacactaagagcaaaagggacttgactgtaaacaggtaccaggtacctttagggggtcatggacgtctgctaatattgtggtgacgtttggacagtgctcacacaaaaacggtacactggaaggtgaatcttttatataaaagtacagttgttttgtttgctaaagacactactaaggtaatgatcagccagccacaaaacaataaaaacctggctgggcagtggtggtccaagcctttaatcccagcacctggaaggcagaggcaggtggatctttgtgagttcaaggccagcctggtctacagagtaagtcccaggacaggcagagctacacagagaaaccttttcaaataaataagtaaataaataaataatatatgtaaacaaaaacatgcattcacaaaaagactccagctagatttacaactggaaacagtgtccatgaccaagatagtttttctggatattttggggtgtacattaatactactaggtaggaatagtgatacatgcctgtggtccaagcactgggaaaactgagtcatggtattgtgaatttcaagttatcctgtgctacatagtgaggtccaggccagccagagctgcatggtaagaccttatatccaaagtactaaacaaaacaaaaagtccattactaaacaataaaagatcagctcctgggactggagagatggcttaacagttaagagtgtgtactgttcgtatagaggaccatgccaggattacagccacctataactccagtttcaggaggctcagcaccctcttctggcctctttgggcacctgtactcatatgtacatacctacacacctagacacatatattcataattttaaaataaaaattttaaacatgctttaaaagaactcctattaccccagctatataggttaaactcaggagttctggcttgagcaagaagagtcagacataagcaactgtttgtatgctgctttgggggaggggcactgagtcagtttccctcctcagagcagtcctcccccatcagtctctctggtgctgggattacaggtgtgagccaccatgcatgccctaactaaaaagaaagacaatattcgaacagaaggcagaaaataaagactctctttctgagtttaagaattgattctaaaagaaaatatgagaacttttgggagatgttagatatagtttttaaaaatacataatgctgtcagttccaagccaactgagcattcctaattgtctttttcttcctcttttttttttctcttaaatttaatttgattgattgatttgagagtttttttgtttgtcccaggtctcactgtatagcacaggctagcccccaactcattatcacccatgcctcctgagggctggctaggcaggcaagtactacccaacctcactcacaccatttttcattttttattttcttttcttgagacaagttctcagcatgtgactctggctagcctagaactcacagacatccccctgcctctagcctcaccattttttttcctagcaaagcaaatcctgcctttgtttctagaataagaagttgaagaattgcagctaatgctatttaacatacacatatatatggcatacaagctaaaaagattatctacacaaattgtctagagaacctcagggagaaaatagtgggtcttttgctttcttgcatatggtttttcttgtcttttctttgttgtttcagaataggtcccaagtatttcaggctggcctcaagcttgactgtatagccaaggatggcctagaacacagggttgtgccgtcagtcctggtttatacgttgatgaagatggagcccagggcttcatgcttgctagctgagctacctccgcatcctgcataagcttttgtatcgaaaacaaaggagatcctgtgatagctgcttgtactgtgttcttaactgtttcttatggtaaaatggggtctttgatgttctacctgtgaaagggtaattatgcactgatgtcctctcttcttttttctgtcatttttcttttattatgaaatatttaatatctttcaaagaatacgtgtaacatatgtacattacaaagcacatgtttctgcctctgttatgtaaagctcttgccagccctctcctgagctgatgcctattctgacttctgtgttttcattctcttgagatacacacatactcacagacacagtctctctctctctctctctctgacacacacatacagttccctaagatacagatacacatatatgcatgtgtatatatatatatatatatatatatatatatatatatatatatgtatatgtccttatatattgctaagttatgcttttttttaactttactgacatgctaaagtacagtatagagtctcttaaatcttgtctttcatgactgcatctccatgattaatccatattgtttatttatccctatcactgtataaagttctgtctttagcaccttcatgtattttgttcttatcctctctccagtcctctccttaaccctcagcaagagttaagtgtgaaaagagattaatgggctggagtggtgatgcccacctttacccggcccttgggaagagaatccctgagttggagcccagtctgggctatgtgatgagccctgggagggagagcagaggcttccctgcatgggatgctttgaacaaagccttgaagtgactcggaaatatagataccattagattttgcttctgtttctataagcagagtaagctatatgatttgcatttttatagcagggcatgagttatatagctataatggcagctgcaggatagaaagttttaacacactagagtgaaatgtatcttggatacagtcttggtatctgaagatcagcaggctccatatggtgccactgagccagtaaatctgaaggaaatattcctgttgctggaacatctaagagtataagtttctttttaagtatacaaatttatagtcttttcatctgacttctccatgatttttagtatagcctccattgtttgatgtgtaattttaaaatgatagcaaaatttctaaaccaggaagttactacattgaaagacttttcaagtcagttaataatgcctactaataagaatagtggattcccccagtaatccactctggtaataatgtttagtttactagaatggtatttgtctcctacagaatataatcttataaaagaatcttggagtagcaggcatggtggtgcatgcctttagtaacagcactttgaaggcagaggcagatgcacctatgtgatttcaaagccagactgatctagaaagttcaagcatagctagaactacacagagaaatcctgctttataaataaataaataaataaataaatgtatttatagtacaaaacatagtgtgtgtatataccaatttaacttatttcaaatataaccactttttaattatatgtgaccataggtttaagacagtatgagatttggtataaaatttaaattctttaagatttagtttttattatttttaactgtgtatatatgtgtctgaaagtgcacatgagtgtggtgcccttgcagaacacctcacgtggatgctgggaaccaaattcaggtctccctgaagagcactttgtgttcctaaccactgagccatctctcccgccccctgagttttaacttataaaaataatttatgttagccacacaatagggtgcacacatgtaatgccagcattcagaacactgtcacggatcctctcaagggcagtcagaactccaaaatgtaagttccagaccagcctgggctatgtggcaagaccctatagcgaaaggcaggaaggtgatagtccgtcattccctatgtgtttgcttttgatatcagatgtagataaccatccataggccaaaactgggaataaaaaaggagagagaatgcaagaattgtcagagaaatttgttaaggtttctgttatagacagcatcatatgaaagatttaaaatgaagccagcattggtagagctagtcagtaagaccgtggacagccagagcttaatagtgaacggggatccagcacagtgaaatcttaggaggaccttgtttctttgttttgctcctctagcctggctattgagataacggtagtgtggaatcacggatttcccttcttgtatcaatctctaaattagactcaggtggtctgaacagtggtctcaagccctacagaaaagtacacagggtatgttttctactgtccatggctgaggccccatttatccttatgatatagggtgtggcataacttgtctatggatcagttattgtctttgtaagaagccactgaagtagccggataaaagtctaatcatttggtttttttgaatggggaaagcattaaagagagtagaggcttattaacatcattgaaaaaaataataggtatttttattctaagaagtcatgcatcaatgaaatttaagttactgcagctccggggcagcaattacttacatattgacaacttatacatgttttacatgcctgtttgctctctgctccctactgaaatgtagttaccatagcaatgaacacatcacgtggttcccttgctagttctaaaatagagaacagcgatatgccatatgagctccatttactttctacaaggactgcatatacaacttgaggccattccatacccttcagatagcttatcattgatttgaaagacagttggtgggagtgtatttccagcctctcctgcactagactatggttagctccttgcaactgagctaaaagagtaactccagtagagctgactggccaggactctgctgttgtatatttaactaaatattttctgggaaaaatcagtgctaattcaagattagataggaggagcatatataatatttatggaaacattttctcagtctcactgttcaattcttaacccatcttcatttggggttgttttgttttgtttttcctatttttctctaaagaaagagttcattaatataatactgtctctacagataaagtgatcctaaagtacaccagagcttggtttagaattagcaggtgctaagttcagctgaaagcttgtagtttccttgtgggaccgttatttctttacacagtgtcagcataggttgtactctgtgactatcaaagggacttcaggtctgtatgcttattgctgtcagctccccactaagtcccagtcttgaattctctgagcatgtgtctgggtaggatgtcagatcgcaaggatacttagcagcataccccacttactgggccgtttcgtggctcttgtctggagtggtgcagcagtgcaaatgccgtagcatattatgagatgtgttactatgtgacttttctgacgatgtataaagcaaaatctatttgaattccagctgctggccatactaccctgctgtctctataactactaattaaaattcttaaatgtcatttttggtaggaaacagccttgaatttcttctgtccagcctcctgcctcagcccactgagtttataggcacatcctacaacatttaacccccactgccctccccaaaaaagttgttgtttttttaattctttattaaaagtactacgaaaaattatgccataatttattattttattttgttgcactcctttttttttaaagatttatttatttttattatatgtaagtacactgtagctgtcttcagacactccagaagagggagtcagatctcattatagatggttgtgagccaccatgtggttgctaggatttgaactttggaccttcggtagagcagtcgggtgctcttacccactgagccatctcatcagcccattttgttgcactctttactgaaacttggaataggaaaattgggtcctaacacacagattagtaaatttatgaagctaaatgggttttctgtttggctacaactgacagaacataggttgtctggataatacttgttgctatcctctcatttcagttgtaattgaaaaccacataactgtattacttatatccacacagcactaaaacagaacaaactattgatgttactggtcttgtacagaaaattcacgagagttgtattattagtgaaatgcatcaacaatcacctgcaacctcagtacaaaagtactatagggatccactatggctttcctgcttagggcttttgggtagttttccttatcatgaatattaccatagtatatcctatggactttatataaatatttccatatgctttcaatctctaggcctgaactgcttgttttttaacttgtggagtgttacaaaagtgcctcccagaaacttcaaacaaaacacatccctagggcactggaaaatccttctggggccatgcagatgaagacctgagttcggctccccagcacaaatattttgtcatggtgatggcagcttgctcccagaaatgaggaggcagaggcggaagagctctggggcttgcggctcacttgccaagtcggtgtgctctaaattcagtgacaagagccttgctcaaacagaaaaggtggtagcatcctcagctggtagacatacttggctccaaacctaaggacctgattttgaattgagatccctgaagacctacatggtatatagaagagccaactcgtataagttgttctctgacctccacatttacaccgtggcttcctcacatacacattcacatgcccacacataaatcagtaaatgtaaagagtagagagcaatgaggaagtcacctggccgggactgcccttcggcatctgcaacagtctgcgcacatggccatgtgcacgtgcaccgcacacacagtcatgctctcagctaagcatctgctaaggttttgcaaattttaaaataacattttgtttttaaattttgcatttctagctatactgttgaatttcttaaaggtctttttgttactgggttttgtttttctttttctttttttttttttggtgtttttagttagggcatttatgtttttctcttctatcaatttcttgtttgcccatatttctttttgttcaaagttttttttctatttcattattttacctcatttaaaagattaagcccaagttgatttataaacatttatttgtcttttgactttctttatttttgatactttcttgtatcattatttagtattctgttctccagataaagtactgtgaccaaggaaacttataaggtgaagggtttcttcaggcttatggtttcagaagaataagagtctatcaacatcactacagggaagagtgacaggtagaacagctgggagctcacatctagaaccaaaagcaggaagcagagaacaaaacagcaagggtctgtggctttgggacctgcaagcctgagccagttaacaagaccacattagcattcccacacagtgccaccacctggggaagcggtatgccaatgtcagggtctgtggggatagtctcacccaaaccgccatacttgtaaatggatcttataatatttgtttcgctgtggcagttttgcaagttataggttatggccaccatcttattgattagttactaattgtgcctttcatgggccttctaatgtagtcatttgcttgtttcattgcaaaagttagtcatttaagtcctagtttggtagatatcctagatgatgcgatgatgcatcccatgtagccctggctgtcctggaactcactctgtagaccaggctggcctcgaactagagctgagatcaaaggcatgcaccaccactgcctggctttcctattcctacttacaaaggatataatcatactggcaactatgtttcagcatagcaaagtagcagtggtcagcagccatttctgaatgttgctctaaagtaaagtaacctggggagccacagtaaaagctgacagcgctagcaagcattttgctctttatttgatagtgacttacatatgcatttatctgtctaccttttagcattgtggctagaatgtgtaagcctttccaagtcagtgtattagcacaaaaagcatagcaacaagtatttcccacagagtggaaaacttcccttagatagatgccacgctacagttctccatactgttctgcaggtcaccaaattaaaactgtctattgacatgcttgctttattgctagatgcttacaaaaataacgcaccagggcatgtttaaagtatgaactatactatcttaaaagaacccttgatcctgttcagaatatttacattccaagttataatcacattctatgttaaatagtaaaacaaattgttattacacaaaagtgtataaagactctttccctaaagtaaaaaagcagcagaatataaaaagaatccatgtatttatgtatttagtagcagtgctgtttgttaagggaaagtcttactgtttggaaagcctcagctgaagtcatttctagaatgtaaaaagaaaaaaaaatcatgaaacattctgtacatgcccagatttataagtagaataagtagttatctgtaagtttgccaattcaggtctaccaaaaggcgcttctttccttaataccccaaggatacgtaggacataaagctaaaaatatgaatattgaattaacttctaagatggctttaggagactaagtttgactctctttagaagattcaaaatatgttggaaggcattcaataataactgattgaggggctggagagatggcacagtggttaggagccctgactgctctccagaggattcaggtttaataaccagcactcacaccatgggtcacaaccacctgtaatgttagtcccggggcatcagcaccctctcctgccctccacaggtactgaatagccacacacacatgttgtgtacagcatacatacagacaaaatacacatgaaatacatacgcagaaaataaataaatcatttagaacaagtagattgagacagatttgatgccccaggcctatcatcctagtacctgggagcctgaaacaggactgccatgctgtgaatttgaggttgacttgaactatatgatagggttcaggtcagggctggggacgacacggctcaccagttaagagcactgctattctgcgagtggacccaggtccaattcccagggcccacatggaaggtctagttccatgttactctagttcatgactagactctagaaggtctaataccctcacagacatacatgcagataaaaccccaatgcgcataaaggtgtgggtcttttggtttttgttttgttttgtttttagtttcaggtcaggatgagataaatgagaaaaggggctggggtggggaatgactttgattcaggtagtggagtgcattcctgactatcagcatcctcagatcactcgggatgttggtgaatagtcacagtgttcaggaaagcccgatacacactataccatctcggttgcctagaatggagagtgtgtgcacatggacctatgacacgtctcactgaatttcttgtaagctgatgaccttgctctttgccttttatatttttgtttcctgtaatccacataatttttttaatctaaataaaaaaagaggtcatctatggatgggtggcaaactgttgcctggctcccctgaatctgccttgttgttcttgatgaattcccttggaactttacctttgctggttttgtagtctaagaagaacttacatatgaggttgtagtgtgcttgcctatttctgcctggtgtttttgagcccattacaataactccaccttccttaggttttcctcaaaacatgtcttagttaaatgaatgtttaaatcttgctgtgagcctggcacgtctctgcaatgataaaaagtgagataggtgaacaccaatcctggtggtttaaagtattgttccagggatgtctaagggaaggctgcctgtcctttaccttctggttcaccgataccgtgatgcgtagtgagtgctattcaaataaataaggcccaggaaatgttgagaagactaagagcctcctgttatccccttctctgatatttacatagagcacttaatacagaagtaggactttaatgacggctagttgaaaagtcggtggttctggtttaggagtgggctcaagggcttgaatacaacgcagtgcttgcaaacacactcccactgattagcagcaagtctggttttctttagttgcccttgcccttgacctctaacctttttgttttgcattagtggcccagcttgtgctagccagcccggattgttaatgtccatgtagatgtcacatacttctaaagaacagggaaaatcaagttcttattgtgttgctgcatcacaagtctagtcttccagctaaatgccagaatataaattacatctcttatcaaatctggcgcataaaactttaggatcctttttaatatagtgcatatgctttcaataaatgtctgttttggcaagaaatcaaatgggtgtcttttgtgtcaagtacacttgcattctattttctactccataatgttaaaatggtgcttgtaaactaggtcaagggcaaagagaacgtgggttctgtgtttactttacactcattgagtagtttttttctttgcatgtgttgtattagaggtatttagtttagtttttctgatttttgtcttgtttttcttatggaccaaaattcagtgactgcactaccatcttcccactggctctctccagccactgtgtcttttttctcttctctccaagagacctttgtacatgttctcacttctcttcggactcttttttgccctgttaatccagtgttagtaacctagctaacttattctttaggcttccatgtaaacatcattctcagatattccttgtttctctgcatcactaacctgctcagttctccttcatgtctaccgaatcactctgctctttggtcccctcctggtacatggtcagtgcgagcatggtgaaaggatagcaactctgccatgaagactgtgcaaattgtcctcaaacactttcttgagtctgagttccaaattgctattttgtaaatattcttagtgttatttctgtagaaaaggtattttgatgaaaataaatattataatggatatggatgtatgcatgcacgcgcgcacgaatacacacacacacactcttagtactgttgtataatcatttcccgagaagcatctagaaattagctgtttacttaccaattcccccaatctctgcctgcatccatgccttctaacaggccttcttagagtcaaacctagaatctcggaaatctctcagaaaagtgccatctttaagaagatagcatggctgcagggtgtggtggcgcacgcctttaatcccagcacttgggaggcagaggcaggcagatttctgagttccaggcagcctggtctacagagtgagttccaggacagccagggctatacagagaaaccctgtctcaaaaagaaaaaaaaaaaaaaaaaaagatggtactgtgtgctgcctatgtatgtcttcaagccaaggaaaaccaacagtgcttcatgtattctcgttgatggcccatgagccctggtctccagttctctttacatcctcatatattttgctttgtgcttttactctttttcttcccaacatggaaatctttgttttcaacaagctatttccgactgactttcctccctcaccccctccatagatgtagtattcctcaaattttctcaccatgttggtatcatctcccaatattcatacagtgtgccagatcaaactcttggttacttgtgtatcatttttaattgtatggagcctttttctgtttttaattctgttcttaatttcacatatgtctaaaaagttactttaaacatattttcttcaaatgaaacatgattttaaatttcattcctgctaaattaattaagaaacctccctatttgggggcactttcgttctctccccatcaaagatctcacacaaagcgttgcaagaattattgtctactatcccctgtgttttacccatactggctgtactaagacttccactgttaaaccatgtcagctcttaaaatcaggggctcagctacttctaagacaagagccatcttggtcacagctggacactgaagtagtttcctgttctagatattttctgtcagctcctctgaacaggctcctcactcttttgttcttccctgtctgtacccaggagccctgaaaaaataaatgctaagtattagtaacatggagaaaaaatggacattaatctgtgagactctaaattatttaaaggatcgttctagaaacctcaggtgcaaggctgctgggtgaaaggaaagcacattcagaaaaggtgagacacaggagtgagatcaccgtcgtagagtacagcctgcctggtaccgtggcatgctagcgtgtctgcattctcctggagtagtgtcatatccctagcatttgcctgtagcatttgcctgcaaacagcattggcatgactgttccttaacagctaagtaagcgacacactggattccagcagtttaagattgctgcctgtggtccttgtgacttttaaagagttcctaacaggacaaatgcataagcctggctctcaggacgtaacacgtattaagacctcacttgcagttctatttctcagattcgtggatatgattaaaattaaaatggaataaaacttttaaacgacagttaaataaaatccaaattgattgtggaataaagggcaaattgtaactcgtagtcatgtggctccaagttctatgttttaaaattcctcgagaactggcacaaagttctcctataataatttctgcctcttaaatgacaggtgccccatcttttattgtagcgttgaaattcccatcaagtgagaaaggcacaatgtagaatttatgaggacttgcctcctgacttgagccacggaaacactaccacagcgtctaccctcagccttttcctgtgtccctctcccctgttgtcctctggcctcctgggtctttatttttttcttcctattcatgtcacctaaggcatccctccagcacatggctcttgtttctacttctgactacatctaaatgccatctgtaaagttagagattcttacggagcttgtgtttaaacctcacgagtgtcagcacattgtttcaaactgcaacctaattattaaatgtaagtttgaagactggtgatgattcatatttcccagcatccatactttgcagtttgtttttcttggcaagagtttgtttcaagtatccatgaatgaagagaaaggtttcttgtgttttgatttctagaaagaagtaatgagtcttttcctgccatcttttaagatattattttaccttttatagatagcagggtttaaatctgttcattaatattataggccagttatttcttaatctgtagacttttccttaggggaccctccttaattatctatgactgttaaagcccaccccctaaaaacgtccattttatggtcactgaatttcagttagaaaagattttcacctgaaagtcgttatttatattatgaaaattggtgggtttatgtatcattgcttaaaatggtttgtgtttatgttttctcatgtgtcgttgaagaattttcactcttccctccacatggaccctacagtgcacgtgtaccctcagtcacacctctaggcttagtccagttcagcctcttcctgtgtcgtttccctttaagttaaaaattcgatacccctacttttacttttcttctttattttctttgtctcattttatttaatcgaaggaacccgtaagactgtcatataactagaaataaatggtatcttatatgtttgtccattactaaaattcataaagaggtggaaaatgatgactgctaccttcctttattcttaccacagatactgcaagaaaataaaaaataaagcacccagtcatcatagccaagagagtctacataacactgtccgtgcctgtggagcatcacatgagggctaacactgtcccggtgatagcatagcgggggcactcatcaaacgtcgtccaacatccactgaatagtatgagtgtgatgtatttgactttgaggatattactgggagttcatatttcattccacaaccgttcagaaagttttctttggtaacactcagtgatttggaatgcttttgaaaatctgagatagaacagaccttgaggcttagtgttcgctacctgaactatcattttctagactagtgtctcactggttagctgcactaccagccttggcttatcatgtttacttcaataatacctttgttttgttgtgctttcttttttttgaccttaccatctttttaaaataaatgtagatcactatcctctgccagcagtgggaatgtcaaggccaccactgtgaaagagaatgtactggtaactcagtctccacagcagtgctcagaaggggcctccgtctgtaaactctttcctgtggaagcaagtggaactgagttcagattcctatttacaaagccgagcaaatcagcaagttcttatcatgctggtactggggagggagagtaggaggatcccggagctggctggccagctagtataactgaatctgagggtcccggccactgaaagacaggcataaggtgtggggcaaaaggaaaagaaatgcagtgttgccctctgggctccacacatgcacatacacacacacaattaaaatggctttacaaagccgttgtgtcctagtcactcttctattgctctgaagagacacaatgaccaaggcaaattaaatgagaaagcatttaaataggggctcgcttactttgtgtcagtatggcggcaggcatgacactggagcagtggttgagagcttccatctgatctacaagcgagaggcaggtgaatgagactgggcggcctggcttgagcttttcaagccttactacccaccctcagtcactctctctccaacgaagccgtcgattcttccagaacagctctaccaaataggaagtaagcattcaaatatgtgaacctatgaagccatttctgttcaaaccaccacgccaagctcagcgtgttgttatgttttgctatgttatccttattctctttggtgttcactgtctacccaaaatgtctagcctgcatgcaaccttgaaaatgtaattataataatgcaaattcagagtttaatattcttatggaaaaatctattctcctgattttgtacttggaagcaaaccatataccttaattccacagagtggctttcaagagcaggacagctctaggtatagcaggaaatgctggttatagaaataccctcacaaaacacagcaacccagcgactctccaagcttctaagtcacagctataaaaaagtcaaatggccttttacttttttagcagagacattgcgtttgccagctaaacccattctaatgcacatttttctgttttgtactgtgtgttctcaagaagctgatttgtttattcatttagacagaaataaaactgtaagcctgtgatttgaaaggcaaagacaggattatgatcaaatttaggctagcctgagctacattgatatcctgtcttaaaatatatatatataagaatcatgaaataaaaagacattaaaaaagaaaagaacaagagctcatagcaatgtaatgtggcagtttggggacttgtctttgctttccatatcatttgggaagtcaacaggggtttattgtctatttaatgcaaatggaaaaaagagtttctgcactagggacttagtccagtaagaaagataaactatctgtacaaataaccatgttttcatgattgccagtctgagcagcttttataacttgagcagaatccttactgcaagaagccactcatgaacaatgcagaaatgctttccagtaagagaaagatggctgaactaaccctgtagggatgggtaggagtttgacaagagtggttgaaggtattctaattcatttagtgcctacatgtgcaaggtagcatggaggaggaaaaaagcctggggcatggtagagagcagcaagcattctagtttgactggcacatagtgcatatgtaagggaataataaaaaatctgtatgcaaagacaaactttacgcttgtgtacaaggatacattctaacctgatgaaactcataccagtacctagacggtagactgcagcactcatacttgcaagaataagtacaagcatggcctagttgtgaagcaggagattggaaacctgggtcttggaagtttagattggatgtggcagaatttgggacttgtcaaaaggactcagaaagcacagaaggatatctggtgaagatatcagacaaagagaggatgagaaatccacctcccaccaatgcccatcccactggatggaaagggggaacccatgaaaagctgagttacttttcttgaggacacttagcaaatgcaggcaaggagaagaaacagaatacagggagtggaggaagatatgcaatcaagtctaagaaagtttccttggaaagggtgaacagtacggaactctcagacatcagcaaagtctcattttcacctatttattatcccagaaactacctctgacatacgccatggcatgccccgccccttctgacatgcaccatggcatgccccgcccctcacatccatacacacgcacatgggtgtcctcctgcacgcagagtaataatgcatcttgtcagccccaaatctagtgccatccttcatactcattacctctgtagtctcaggcatactctcatctcttcacatctttacactcctgcctgtaaaatgaaagtaacttgttcttaggacttgagacaaaggaaaatattggcatttagtgaggaatcagattacttaagcctttatggtgaatcccacgctgtccttttagatgagatgaaatacctatacttccaagagccttttctcgggccgtcccctcctctgtctctttaaagatttgtttatttttatcttgtatgtatgagtgtttatttatctgcatgtatgtatatgcaccatgtgtgagcctgactcctgaagtgtccagaaaagagaaagcccccaggcctggagttgcaagttcttgtgagccacgctgtaggcgatggaaacggaacccagattccctagacagccattttagtcaaattgataagttttaagttcagtgagagtctgcttatgtctcaaaaagttagtggagggagtcatcatggaaaggcacccaacatcaaactctggcccctacactcactcacgcacatctatacacacccaagcacttacattgttctaaaagttaccattgctagataatcaggcttaaattgtggtgagattcctattaacttcaatttaaatgtgcttcaaggtaaaaatgaatttttttttcttttaaaactatttttttctttaaattgtggtgaaattcctattaacttcaatttaaatgtgtttaaaggtaaaaatgaaatacttttttcttttaaaacagtgaaattagttggctttgtgaaaatgagtttcactttgtgaaagggttaaggctcatgaactaaggcccatttttttggcttgtgttttgtctcttaaatgtttttttttttttttttttggtttcattagtagagtcataatttatatactgactatctagtttttattatatactattggacagaggccatgtctgtctttatagttacacattggcccacagagtttctggcactcaataaatgttaaataatatttctattcagcattctgcagacaggaagcatatggtaataaatgtcagagcacaggttggaaatctccaaaaagttatacattatattcttcagaaaagccagttcagacatttttgtgaatgaaatttctttttaagagtagttcccaggctcagatgtttcttaacagctttccagccttcactttcttataaactaaagcttttcctcgttggtaataataaaattttgaagtgttagcactaatgcagttgcatatgaaaatgtataagtgattttatagatagcacaaagaaaatgcagttcatcatctgaagaaaagctcaagataacattcagagtcttaaacaatctgtctttatattctgccgtgcgggatgtgtaaaagaaacaacagatatttatcacgaaattccagtataacttggaggttcatcgtggccacagctgtcacagacctcacagtgacattagacttatttaactcagtgtctttctcacctgagtattccagcactacttaaaaatcttactgcagtctcggtgagcgtgccatagcctagaataacatatgacatggaaattgaaaaacctgatgccagaaaaaggaattctttgtacaggccatttcccagttagaaagacatggttaacctcactgagctatccagaagtgttctaaaaacacggatccaaagcttctttccattatttgcttaccctgtgattgatcttctaccacactgtgatgttgcttggagtttcggtacctgtgattaagagtctgtcataggactaactagagtgtaaccccaggttttggtcaccttgctgaaatgtctgttgtaaagactctgatgctcactgcacaatggtcattttcctctccatgagctccgtacagtatagaacttcttagatggagtaagataaagagagaagaaatgggctaaagaggatgaacaaaacactgcatctctttggtcgtttattagaagcaagttactagctgaagcccatactctaggaaaggttgtccaaggattctgggtaccagagtcagagattcctgaagccctctgctgtagcccacatctttcagataagctaggccactgaatgtattctaggtcttctagtttttaagaactgtccaagaacttacattcagtaggcaaaatgtctttgcagtattatgttaaatgtttccacttttttagtataatccaataaaattagtattagcccaaagtgagcaaaatttaattaatcaatagatgagctgaaagcttgctacacagcaaaatggctgtaaaactgaatcttggtatcttttcctctaagccctacctacactcttaccatgttgcctgtcactgcagagaaagccattcaaaacagcatcatgcctcagaataagaggtctgaattttctatttgtataaagaaagtgttatacgtaggttctggttagaaaaaaggacaagaggttgttgtcatcataccttagagtcatctatttgaccctagttaggacttagagtggtatttttttcatctcatcattttaagatctgcaacagctggagccctttatcctaacagatgctctttgtctaaatccatatttaggagtaaatatttttctgataaaggagaatgatgtgaaaaagaggcattgatctggtgccctattctccctaggtgtcttcctctcaactgccaggtctggggtaaggatcatggagattgttcccagtgaagccacacggccaaacccttgagtcttctgctgtctgtaacaacaaagcggtgttattggactagtgtttcagatgagtgggctgctgtctgagggtctaacctgagccttccttcccctttccatttcagcttatacccaggactcctcatgtctgaggtgcaggtgcaggacgtaacacgcagatggtagctctaacttgggcccattgtcttgaagtgcggcacaggatgtagaagggtcaaggtcgtaagctatgacagtaatgtaggttaggtcatccccatctgcctagaaaatcctaggtaaccacaaaagcaaaagggaaaaccgttcttataacacctgagtttggaaaattctaatgatttcagatcaatatgcagaaattgtatttctataataactggttacaaatgattgaaatgagcatgaacagattgtagttttagttaaatatcaattccattaattctgctttatttaagtaagaacttgtgtgcattagataaaataaaaggagttttctcatcagttgatgataaaagaaactattgtcttttgtgcacacaaacatatacttgcttttctctcagtctgaggattgtcctttgggagtgtgggggttgggggtttggttgcttgcttgctttgctttggtttttagaaacacagtttctctgccctggctgtccttgaacttgctatgtagaccagactggcttcaaactcatggagatctgcctgcctctgctcctgagcgctggaattaaaggcgtgtgtgttactacacctggcttaggattgtacttttttaataatagcttgctgatgttttttaaacctcacttcacaatctttatctggtgctttttgatcaccatgcttctagtctgggtggtgaacccatgagcctctgtcagtcctaagctgcttggtgtggacaacaggaagatgctaattatgcctcatttcattgacaacactcatcccaggaaggggaaaaggctctgttgttacaaaagacatagtatacgcatttccttcattgcaaaagataaaggattctgaaaacttgacctgtctctgaaacagcataatggtggaagtgatggagacagagggaagggtcagtgtgaggtgcgggctgatcagagactcttcccactcccaggcctgtttggttttgctcatgttgctgcttgccatgcatgaatggacgtgctgtactctggagcaggcaaacctccatgtcagtattctatctccttaatccctcctcctttgtgattttttttttttatgtcagatctaaaatggggagccttttgtaaatacagtgattatcacgtggataatcacctgcatcaggaaccgccctgcctctctcctagccctagctgctccccacatgtcacagccccttggtggctggattttaacctgactgcttcattagatttgtgaaacgcagtacgaggaggcgccctggggcagcacagatggggacttgcttgttttcttttctcactttcacggcaatggcacactaacaagtccttttcaatttagtgtgatcagttcacttggaatcactcctgatgcttggaacctgcctaacttctgcccaccacccgtgctcactccttccctgttttctgacctaataccttttctctctgctctttcatgtggtgaatctgagagcaaaaatcctgcttaaaattcttgctgggtcaacctgttcccctctgttgttttgtttgttttgctaagaggggaaaaataaatgcctttccatcattgtatctacaaacaccttcagatcagaggttagtgtgacagagtccacagtgatgtgagacagctgccagctctaatggtgtgacttggggctccagtccaagatcaaaggaaggtgagaggaagccagatgataagatcattttaagacacagaacgaggacttagctgttctgatgatagggcacagctcagcaagcctgtgtgaagaggcaccaagatagaaaattgagttggcttttcctaagaatgtccatcctaagccagaaatgtgctggtgcttgcaactgtttacatatgtggaaatgtcctgaggcaccccttccttacaagataatgatttgaagccaagcactgttgggagccgcgcccacattcgccgttacaagatggcgctgacagctgtgttctaagtggtaaacaaataatctgcgcatgtgccgagggtggttcttcactccatgtgctctgccttcctcgtgacgtcaactcggccgatgggctgcagccaatcagggagtgacacgtcctaggcgaaggagaattctccttaatagggacggggtttcgttttctctctctcttgcttcttgcgctcttgcttcttgcactctggctcctgaagatgtaagcaataaagctttgccgcagaagattctggtttgttgcgtctttcctggccggtcgtgagaacgcgtctaataacaattggtgctgagacccgggacgggacgagaagacctgggacgagaaattccgggacgagaaattccgggacgagaaattccgggacgagaaattccgggacgagaaaaaatccgggaagaaaaaacccgggaggaaactcgggacgggagtttcaccggcgcaaggaagatccctcattccagaaccagaactgcgggtcgcggtaataaaggttcccgtaaagcagactgttaagaaggattcaactgtatgaattcagaacttttcagctggagaacgagagtaccagtgagtatagctttacgaggtaagcctggccttgaactttctaaggaaattcaagacagtctatcagaagtaaagtggaaaatagctttataaggtatgtttggccttgaactttttctagtgttaaaagcccttttgttccttttcacatgtcaacaagtggttaaggcagggcggattctagaggaaattcaggacaagctatcagaagtaaagcggggagagagagtaggagcaaagagaaaacatggtgcacaaaataagtatacaggcctttccaagggtcttgaacccgaggaaaagttaaggtcaggtaggaatacctggagagagattagaagaaaaagaggaaaaagggaaaagaagaaagatcaattagcggaggtctctaggaaaaggagcctgtgctcatcactagatgagtttaaggagctagttcttagtagctctgaagcagatgaagaattctcctctgaggaaacagactgggaggaagaagcagctcattatgagaaaaaagggtaccagccaggtaaagtgctagctaatcagttaaggaaaaagccaaaagcggctggcaaaggtcagcttgctgcttggcctcttggcagtcggtttcaaggtcatagtgcacctgtgccctatgcagagccctcgccctgtgtagtgcatcagccctgcgtagtgcatcagccctgcgcagagaggcaatggacagagaggcaatgcacagactcgttcattccaaaggaggaacaaaggaaaatacaacaggcatttccggtctttgaaggagccgagggtgggcgtgtccacgctccggtagcgtatatacagattaaagagcttgccgagtcggtccgtaactatggagtcagtgctaatttcactatagcacaagtggaaaggcttgcgaatcacgctatgactcctgctgattggcaaacggttgtaaaagccgctctccctagtatgggcaaatatatggaatggagagcgctttggcacgaagctgcacaagcgcaggcccgagcaaacgcagctgctttgactccagagcagagagattggacttttgacttgttaacgggtcagggagcttattctgctgatcaaacaaactaccattggggagcttatgcccagatttcttccacggctattagggcctggaaggcgctctctcgagcaggtgaaaccactggtcagttaacaaagataatccaggggacctcagggaatcnnnnnnnnnnnnnnnnnnnnnnnnnnnnnnnnnnnnnnnnnnnnnnnnnnnnnnnnnnnnnnnnnnnnnnnnnnnnnnnnnnnnnnnnnnnnnnnnnnnnnnnnnnnnnnnnnnnnnnnnnnnnnnnnnnnctccatgggcagaaatgatcggaggacatgttttaactgcaggaagcctgggcatcttaagaaagattgcagagctccaggtaaacagggagggactctcactctttgctctaagtgtggcaagggttatcatagagctgaccagtgtcgctctgtgagggatataaagggcagagtccttcccccacctgatagtcaatcagcttatgtgccaaaaaacgggtcatcgggccctcggtcccagggccctcaaagatatgggaaccggtttgtcaggacccaggaagcagtcagagaggcgacccaggaagacccacaagggtggacctgcgtgccgcctccgacttcctattaatgcctcaaatgagtattcagccggtgccagtggagcctataccatccttgcccccgggaaccatgggccttattctcggccggggttcactcaccttgcagggcttagtagtccaccctggagttatggattgtcaacattcccctgaaatacaggtcctgtgctcaagccctaaaggcgttttttctattagtaaaggagataggatagctcagctgctgctcctccctgataataccagggaaaaatctgcaggacctgagataaagaaaatgggctcctcagggaaatgattctgcctatttggttgtatctttaaatgatagacctaagctccgccttaagatcaacggaaaagagtttgaaggcatccttgataccggagcagataaaagtataatttctacacattggtggcccaaagcatggcccaccacagagtcatctcattcattacagggcctaggatatcaatcatgtcccactataagctccattgccttgacgtgggaatcctctgaagggcagcaagggaaattcataccttatgtgctcccactcccggttaacctctggggaagggatattatgcagcatttgggccttattttgtccaatgaaaacgccccatcgggagggtattcaactaaagcaaaaaatatcatggcaaagatgggttataaagaaggaaaagggttaggacatcaagaacagggaaggatagagcccatctcacctaatggaaaccaagacagacagggtctgggttttccttagtggccattggggcagcacgacccataccatggaaaacaggggacccagtgtgggttcctcaatggcacctatcctctgaaaaactggaagctgtgattcaactggtagaggaacaattaaaactaggccatattgagccatctacctcaccttggaatactccaatttttgtaattaagaaaaagtcaggaaagtggagactgctccatgacctcagagccattaatgagcaaatgaacttatttggcccagtacagaggggtctccctgtactttccgccttaccacgtggctggaatttaattattatagatattaaagattgtttcttttctatacctttgtgtccaagagataggcccagatttgcctttaccatcccctctattaatcacatggaacctgataagaggtatcaatggaaggtcttaccacagggaatgtccaatagtcctactatgtgtcaactttatgtacaagaagctcttttgccagtgagggaacaattcccctctttaattttgctcctttacatggatgacatcctcctgtgccataaagaccttaccatgctacaaaaggcatatccttttctacttaaaactttaagtcagtggggtttacagatagccacagaaaaggtccaaatttctgatacaggacaattcttgggctctgtggtgtccccagataagattgtgccccaaaaggtagagataagaagagatcacctccataccttaaatgattttcaaaagctgttgggagatattaattggctcagaccttttttaaagattccttccgctgagctaaggcctttgtttggtattttagaaggagatcctcatatctcctcccctagggctcttactctagctgctaaccaggccttacaaaaggtagatgacggtgatgtataatgctcaagtattctcctgcttttttaccactaactaggaactgggtttagccttgattcagacagccttggctctgtctggacaggtccagatgactgacaccattaacactttgtcagcctcagtgactacagtcatagatgaacaggcctcagctaatgtcaagatacagagaggtctcatgctggttaatcaactcatagatcttgtccagatacaactagatgtattatgacaaataactcagcagggttgtgaacaaaagtttccgggattgtgtgttatttccattcagtatgttaaatttactagggcagctaaattgtcaaaaagtctttttcagtatatgttacagaattggatggctgaatttgaacagatccttcgggaattgagacttcaggtcaactccacgcgcttggacctgtccctgaccaaaggattacccaattggatctcctcagcattttccttctttaaaaaatgggtgggattaatattatttggagatacactttgctgtggattagtgttgcttctttgattggtctgtaagcttaaggcccaaactaggagagacaaggtggttattgcccaggcgcttgcaggactagaacatggagcttcccctgatatatctatgcttaggcaataggtcgctggccactcagctcttatatcccatgaggctagtctcattgcacgggatagagtgagtgtgcttcagcagcccgagagagttgcacggctaagcactgcaatggaaaggctctgcggcatatatgagcctattctagggagacatgtcatctttcatgaaggttcagtgtcctagttcccttcccccaggcaaaacgacacgggagcaggtcagggttgctctgggtaaaagcctgtgagcctaagagctaatcctgtacatggctcctttacctacacactggggatttgacctctatctccactctcattaatatgggtggcctatttgctcttattaaaaggaaagggggagatgtggggagccgcgcccacattcgccgttacaagatggcgctgacagctgtgttctaagtggtaaacaaataatctgcgcatgtgccgagggtggttcttcactccatgtgctctgccttcctcgtgacgtcaactcggccgatgggctgcagccaatcagggagtgacacgtcctaggcgaaggagaattctccttaatagggacggggtttcgttttctctctctcttgcttcttgcgctcttgcttcttgcactctggctcctgaagatgtaagcaataaagctttgccgcagaagattctggtttgttgcgtctttcctggccggtcgtgagaacgcgtctaataacaaagcacggtgacacagcctaaaatcccagcacttgagagatggaggcaggaacagagatagttcaaagccagctcagacaacataccaagattcagatcaacttaggttgtataatgtgagctcttgtctaaaagaaaaaatacatatataagtatattcttgccattattctgtaatttaccaagttacagttaatttattagtatatgatcaaaaaagctggcattaaaaattaaaacaacatagccatgcatggtgacacacttctatgattccccacactccaacctgtgttatctaaaaacctttttcatacaaatagtgttccagatgtgggatttaacttggtaatgtggcacttctagcaccttgagggcctgagttcggttcctagtactgctccttgcctcagtttaactactgcatggacttgcagtctttctgtcatagagcaattttaattcctcagattccttttcttttaatgaccctgaagccccctcacccccaccctgtgtcctacaattcactgttgcccaggctgggcatgaaaagtagttcttaggggctggggagatggcttacttgttaaaagtacttgctgctcttgtaaaggattcaggcttggttcccagcacctacacagtagctcacaaccattggtaactccagttccaggggatctgatgccctctcttgataagtacagctaccaactatgcacatggtacacaaatatatatgcaggccaaacactcatacataaaacaaataaatctaaaataatagtaagtgtagtagtagttttcaccagagctattcagttgcattattcgtctaagaattcatttacttaaatttatgatggcttagaaaacaacacattgatatcttttcaacctttcacttgacttgatatctcagccagcaaatattatttgtgaactataaacattgttttgtaaggaaattgaaatgagagtaaccttgcttacttgagccattcatcaagggtttgtggtgtgtgtgtgtgtgtgtgtgtgtgtgtgtgtgtgtgtgtggtacgcgtgtgcgtgtcattgtcaactgtggctcactagtcagcctgctctttctctagtgaatgaggggatcaaccctcagcttaagacttgctgttaactccactgttgatctataatcacgcattttgacttttccacaccccaaaagtataggttctctaaatctgttattagtatagtggaccataagtacatgcatgtatttcctaattagtatttccctcaacatggaggaactgtccacatttattttaaaggcactggctgtactttctgccttacatggtttggtgcagcagtcgttctagttgagttggatctgctcaccacttgggctcaaatcccattcttctattaatatctcttggcaaagataattttggaggaatgtgagttaagatgtagagactcttgacagttgtctgcaatttttttcactttcaagagggaagtagaaatgaaaagtaatattgcctccattttctatgattcctaaaattaaaatgtatgcacgagctaaacagtgaaagcgtaaggacttagttacatagatatgggtgggtttttttggtttggggtggtttgttttgttttgtctttcagtagcctgttagaaaagcattagcatatggcataatgttcattaaattgtgctcatacatgtatatgtataaaggctagaagaactttgtgtattaaaatttttaaacattcttttaggtgttaacttttctaaccttttcctcttagacaaaagccaggcacggtgacccaaacctttaatctcagcacttggaagacagaagcaggtggatctatacaagtttgtggctagtcttgcctgcatagcatttcctggccagccagggctatatagcaagaccccaggagggtggggttgaggggtatagagagtggaagcattcgccccgtatatcttagacctaggttccagtgttttgtcaagttcgcttccttttgttctcgcagagtattccaagttacagattttgtatgtggctttttacccttaaatactcctggacacagccctaaaagttaaagacaatttccttgtcacactgatcattcctaatatcaaactgacgattccttctatcctctgattttcagattacctctgttgaaacatctttcacagctggtttggtttaaaataagatgcagtcatatgctggttttgttcatttcccttcccagtttatctttgaggctgccattagttaaagaaacattactagttgctttgtaaatgtgcccgccttacagattcgttcactttctcctttaattgttcctctctttttctcataaatacaagttattgaactaaacttttggttaattggtgcgaagatattttggctagactacatcctggttgataccgtgaactccattctccatatctggggcacaggatatttggcaatcccactatgagggatgctagtggataggactgaccacaggcttacaatgatgacagcttggtcccttccattataaagtttcactttgctccccgtggccagcatgtaatctgtgctgctttgattccatgggaagaaccggttccctgtcatcctatcactcaatgactctaacaacccactggtgacccctgtctctataaatttcatcatggggttgggaaataattgtttccagcatctatatatctattagtaggcattctcatctccagaagagcttcctgaaaagtactcttttaattacacgtgtaaccaccagcctggtccttgggtttcaagtgaatgcctttcctttctgagtgaggtcagaacacctgaactcattggcagccactgtaaaaacacatagcatcttccctgtcctggcgtgtgaagtgtgttgacaccatgtggcccattgtttttcatgccaagacaaaaaggaaatattttggggtaaaaataaaaattaatctatgtgagtatcttgagataattgtgtaaaaagaagactgaatgagtttcagaatgaattatttcttcattatctggcactttataattaactgtccttttttttttttttttcaggaagctgccacttttgctagagagcaaggctttgaggtgagttaacccacaattgcacactaaacagatcctaaaggttttttctagctgataatgaagttcttttggacagtgattgatgtgctattatactctcagagcctcgctgcagttgccatggaaacttggcagtcgtcatggtttctttgttctgccagcacagtgttatgacgcactctgctaggtctgcacccaacatcgcctacagatgttatttattgaattttgaaaagcctcttgggaagccaagaggttgggcacagtttcaagctgcctctgcagatatggggcctgtcagtttgttcagttaaaaagctacctcattagctgcattacatttcataagaattccgtgctgcagcagtgttagggcaagacagaatagtgagctataatgtcacttaaataagttcaaccctatcgcccgtaaattatcgttatgcaaataaatctccaaaggttgtacttaccagttgttagggctgattaatttctatcctgcttatgagcttcttatttgagtcctgtctccctttcatcttttaaaaaataacatcagataattttttgtaaggaaaatattgataattagccttaattttctggtctccgttctgtttacctactagaaggacaatcttgtcaagattcaaaactccatgtggtcgttgttggcaaaatcaagatacagtcaagaccgtgtttctgtctgcataatactatcttctaattgactgttagaaaacactaacttcagtatgaacccaggttaagtgacagataattaactgggtttatgaatctttgatggctgtggtactgagccagaacaatgtcaactgttctgttttatacatcaacttgtaatattgactagagaaactttttaaaattatattatttatttgttaggagggcacttgcctgacacagtatatgtgtgacgctcagaggagaacttgctgaaatcagttctatcccttcctccatgtgggtgtgggtattgaactcaggtcgtctggtttggcagcaagcacctttatcggctgagccaccccactcatgtaactatagaaataaatgtaattgagatttagtaactccacccttatttgcatactcaatattgtgtaccacacatagaaactgtgagttgaatgttgattgaacaatactatgtaagctttaagctccttaaagaaatgtgaatttgtgatatttacacctattaataaaatgaattagaagcagattcgtcatcgagaaacaaaataatatacatgtgtggtgactgtgtaagccagaaacagttcctctacatcataaaggaagacagtgagcttgtctctaagaattccctcaatcgtttgaaacacagaaaaatgacatagtcattgacttcttagaagtttgcttttgccaggtggtggtggtggctcgagcctttaatcccagcacttgggaggcagaggcaggcggatttctgagttcgaggccagcctggtctacagagtaagttccaggacagccagggctacacagaaaaaccctgtctcaaaaaaacaaaaaaacaaaacaacaacaacaacaacaaaagaagttttctttcattgttttaccacatttgagtcactgtggaattaagtagtgtagaaagggatttccaacgttgtttgtcttattaatttcccaaactgacaactgctgtataagaccggatggagtcaggagaatgttcacaaatgcaatatggggcctccaaatgccttattggatagaggtgccgtgacctctgacctccacactagaactttgaaacatgtgtgaacacatacactaaataaatataatttttaatgtgaggctagggagttagcactcatgtatacacacagagagacatctaaaacaagtgttttgattgtgagaacatatgttaatgctttcagtcattttaaaggttttacccccaggcatgattgtgtacattcctgtaatacctgttctctagaggcaggcagatctctgtgagttcaaagccagccagggatacatggttggctatcttaaatcataaagttttaactatgctaagttttgttttacaaaaaacaaatattttcaaatattataaactcaaatacttcataaataagaggttttagaatataaatttgtacctgtcagttagctgtgttatcattaaacaaaagtatttgggttccgtgattggtttgcagataggcatatcacatgcatatagtaaaatagcagttccttagtgctcatgtgatgttttctgaggatagtaagcctactaaaggctttatttcttcttgagctctttgctcgaagtgtacctggtctacactcagtctcagcaacaaactgcattctctatttcctgctgaccagcactatattaacctttcagtagttcctatgtactgatttgaaaattgtttccctttgtcatagtcttccataatggattagggcatgtaagcaaaatgataattatcatagtcacctaccacgttacctctgacccacagacccagctccaccagtgatgttgatagtgctgtgttagattcattaaagtacacggtgtcttgatatgtccctctacggttccccaaaagcattagttagcagtgcagaatacatacaggccatgattagagtagcctcaagccaggattgttaataaaaatacaacccacgtgtggaatgctgtctgagaaatccaatgatttttataatgtcattaaagttttctcacttcattagagaaaatacaaaaacataggtctaaagggtagtactcttgaataaaacaagactaagtcactttatcttagcaatttgtattttctctctcatgccttaatgttggctctgaatttggtgcaccttgaaaagaaagaaagagcaaggcaaatggaatgattgaaagaccagagaggcgagcatccttccttcctgccagcacccctgcactcccttagtttctgttactaatccccatcctttcccagaaccacagtgttgccatctgtgatctgacaggccagcctgacacctctaaaataacctgtgtctactcataaggaaagaccctcagttgcgttgtttatgatgccctggtgggcttctctgcaaattctagataatcttttcaaaaaaaaaaaaaagctttaatctttaagatgaactgggcattttttttttagtgagaagcagcagcttaggagagcactggagaaggggataaaagctggaggtaggcagagcacaaggcaggagagtgggtttttctacataggtgatggaaaattgcatagtgcccgatttaaatgacagacctgctaagaatttaaaatgacaattcttggtaaagagtttcgcgcggccttttattattctggaaaaacagctcagactgcagtgtgctgttaagtcttccttttcttgggctgaactgattaaaggtttacattgttaaaaatctaaataaaaacaaggtagttaaaagtaggcttcatttataaagcctttgaaaactgtcataaattgatgggaattaaataaaatgaagaaaatacctccaaaacctaaatttagttattctccatattttcattgtctccgcaacagaaatgtgtgccaatttttgaaaggaattcaaaccattgagtcattttttttttcagcatgactccaagcaaagattttccttctcttgtaggtgtctaaggcataatgctctctccacatggggaacaaagtgatcttattccctttcccttcttcccccagcctctggctacccagaacatccaagcgtcgcagcctttctctggccagggagacgcaatcaccttgtaacactgaacgacaaagtatagaattgcacagtccaatgatcacacttggctgctcaagttaagattatttagcattgcagaaaatgtaaaattcaaggcgaggagtacctgcagctctgtagtaccaactaccctgaatgctaactcaggagggtggcttgaacccatgggtttgagaccagtgtaaagcacagtgaaactgtctttaaaaataaaacaaaatgcattctcactctgctcgtcctatacacattcctaggaccccatagcctgtgggcatgatggctactttattagacagtgcaggtagcaaacatatacatcatcttaaaaagttctgttgatcagcagggaggagaaaatctacatggcatcatcaggaagtaatggttcgttccctgggacctctcacacgtgacacttaggttcttgtgttctgcacagattttagggttgcagtgaactgtcacggtctcagaaaataagtcctacgtcaggccctactggtgctttccagggtgtctgggtcccaaaggaagacaatgtttaaaagggactgggagaaacagatgagatcattttctgatgctgttccccagaacccagtaaaaagatagaaggaaggaaccagctctgcgaagctgtcctcagagccaccgggcatgtgctggagaagacgtgtgtcccccagcccccacagtagtaatttttttaaagaaggaaaagaaagttaaaatctgacaaatagagctatctagcaatgacagaagaaaaacaaaacaaaacaaaacaaaacaaaacacagttaaacaaccagccaagaaaacacacttcaaacagagcaaacaagaggacagaggccaccaaacaagaaagaacacagtgaactgtgtgctccacaaggccagcctctctgggttgagtcaagtgaggaaggcagcctgagacttgactggcaattggcagatcacccaggatggtatagctgagtgggcagtgcgtgggagcgccacagctgggacagatcgggacagtgctcaaacttttgtatcacctgcttggtgacagtgaaatgaaaacaagagagtgaaaggaaggagatgtgtactttttgaaaagaaatcgttcactcatttattaagtggcatgtatcgcagtgtgggcatgaaggtcagagggcaacttgcagaactcagtcatttagaccccagggatcaaatcctggtcattgcccttggcagcaagcatctttacccaccaaaacatcttgctgacccaagaaggtagtctttaaaataacagaagatgatgttgcactaagccagagttgataaaagcacaattatacatgttataaaatgctacagtttataaaaatctttccagtgtgtcaccagaatatttaatacttccagaacccttgagaggaagatagacaggtcaacaggtgaaagccaggctatttgacccttttcagaccacacagctcacagatactgcctggataagctgagctccactctccaagcctggtgctcttccttacagccctcatgttcccctccacctcgctctagcatactggcagtagaagttgggcttcagaatggtcatgatgaatgtcgagtatctaaacacctaagcattggaatttatataaaacaactaggggaaagcacctttaaataaagatatataaagatcaggactaacttgtgaatgtgcagaaaagatgactgggggaagaacagtctatacttttgtgataatagcacaaggcacatcacagagttcacagagcagcaaagtctgcgggtagcctggaagtggtgattccaaacactgagaatcctacgggcagacttgggatcagcaatcctggctgtactgctcctgtttataaccttactctgcatacttcttgcctgcaagtcagtctcttcatctgcaagaggagatgtactaagagacctactgcctagggtaggaaaggcctgtgaatatttttgagtaagttagaggaaattgtagtatctactacatagagagattaacattaaggacccctttagagccctgtaatgaatggctcatggctcaactctgaacgttcatctcttgccccacctcctgggaatctttttcctccttattagatactgtagttgagttttaagtactcaataattttagtccctttctagggattagagggatatcttacagaattgaaagttttagggagaattaaaataagaatctttaaaaggaacaaaattaggattgtattagcatacagtaattacattaaggtctttcgtctccacaactcttcctgctttggttttgtttatttttattttatgtgtgtggtgcttggcccctgtgtatctgtgcactatatgggtgctaccgcctgcagaggccagagggctttggatcccctagaactggaggtacaggcagttgtgagcagccccaagctgctgctgggaatcgaacctgagtcctctgcaagaccagcaagtggtcttcacccctgagccaactttccagctctgccttctttcctttttgaaacaagatctcattccccatagcccaggctagacttaaattcactatggatccccgtgacctagaactcagggttgatcctccttgctcaccctgctatatcccgagggtataggagtggtcatggaacaggaattttttttaagataaggtcttgctatgtggcactgattgtcctcaaactcaggctccttctgcttggtttttttccctactgctagaattgcagagatgtctgccatctagcttcacctttttacagtaaaataactttagctttagaaaattacaagaagagaatggaattcccacttatattttatataccttcccctactgttaacatcttaaataagttacacctccagaagtttaatactaaaatcagaaaattaacatatatccaatgcaagatgtaaagaggatatattccagtcttgttttattttgtgtggaagtattcacgcatgcatatggaggtcagagaacaactttggggagtcatttctttccttccaaccatgtatgttctgaggactaaactcattagtttgacagcaagcgtccttaccccccgagtgtgttctcctcagttttctcttttctgttgtagagtctagcagaggagctcccatgtgacatttgtctcatgggttgttagcagcttctggtccttggcagttttttggtctctcctcattgtctgtgaccttgacacttaggaagtcatggctattcattttatagaatgaccctctctatttgagtatgtctggtgttttcttgtgagtggactgaagttgtacattttgaacaggaaaaccatagagtgatgtgccctcctgaaaacatcctatcagggaagttaaatgatgtcacaaagtcttattgctggtgatgctaccttgatcactgggctaaggtgttagcaattggtttaccctctgcagcttactcctctcttttggagtggataaatagtttggaggagattcttattgctggtgttgctaaccttgatcactgggctaaggtgttagcaattggtttaccctctattgcttacccctttctattggataaatagtttggaggagattctttgacaatataaaaatatcttcttttgttcagaaattttaatatcagttgattattatttaaagtaatatttatcaattttctccacattacaattattgatttttccttttccagaaactgtcataggggagatttgatcctagggattaaacaaaggacttagcacatgccaaacatgcactccaccactgagttacacctgcagccccaataccttttaattgagtattttcttaattttgtcagtaaatggagccttaagggcatttactaacttgttcgaggtcataccagtaagtctaggtttgctgtgttgtaaagctcttccgtgtgcgagagaaggacagaagatgagggagatactgtggacttagaaatctatagtattgtgaagataaaactgaggttttgagaaaggatttacgctgcatgaagccatctcttgtaagcagttgatcctgaatgcacactgagatatttggattaggtgtatactcacagggatcctagagcaagcaatgaaaagatttgacatcaactgtgtctgtggatacaaccagaaaaaagggtgggtaaacctagaaaagtttttggcttgtatatgaaaattttatatcaatcttaaattaccacttttgtgagattaaatttaagacaagtttattttattaaattaccaaactctgacagtaagctatgtctttccaaagagttggtaaaaagaaattatggaatcttagcattcatttattctttacaccattacgaaaacttcacaaattttttcttttacttgtgtccagtggcatgtacctggagtcttggcttctctggaggttgaaacaaggtgacgattaaaatcgaggaggttgagacctgcttaggcagtgttgcaagaactaattcataaactgaaaaccgaggcagagcgaatcagtgggcacttcctgccaggcccaatagcccaagcatgctgcccagaatccgcacggtagaacaagttgtcctctgacctccgtgtcatgccgcaggaaatacattcacatatacacacagatcaaattgtattttatttcatatgtctaggagtgctctacttgcatgtatgcctgcctgccacaggagagcatcaggtcccattacagatggttgtgagccaccatgtggaggctggggcctgaactcaggacctctggaagagcacccagctcttaaccacagagccatctctccagtccccacacaaaaataaaatttaaaaatatttttaaactttaaaaaactacatatactgcataagactatgctctcaagatagtaaatcttttattaaatatgagccatctgtgatcatacaaatcttctagtagtaaaacatatttatactaaaattgtttctaatagcctatccccaattttttaatcttttatttatttaatttatttatttacactccagattttattcccacccacccccaccctgtgtaccctctgactgttccatatcccatacctcctcattgcccctctgtctccatgaagatgtccccaccccatcacccccccctatcccaccagacctctaaactccctggggcctccagtctcttgagagttaggtgcatcttctctgactgaacatagatagacccagcagtcctctgctgtttggggggcctcgtatcagatggtgtatgctgcctggttagtgatccagtgtctgagagatctcaggggtccaggttaattgagactgctggtcctcctacccccccgcccccaaggttgcctgtttccattctttctgcttccaggcccttccctccctcccaagtgggactgaggcatcctcactagggctcttcagcttattgaccctcttgagttctgtggactgtatcttgggtattctgtatttttttttttttgctaatatccacttattaatgagttcataccatgcatgtccttttggatctactaccctcagctattaagaacaaggacatcccgttttgcatgcaattggtgcaaatggatggaactagaaaatatcatcctaagtgaggtaactcagattctaattctttaatgaattaattgatttatttatgtattcatccattcattcttctgcctttctttttggctgagaatgagaagaaaagctttattatagcacaaggtccaatggatggaaaagtatagatgaagcaagctgccactgctctgattaattagcatcgtgtgctcattctgttggccatgaaggtgccaagggcgccgcctctgcatcactttcccagtgccgcccattaataccatcagtattgattttcttatcaaggagcagacttgtactcctttaagataagtacagaaaagtgagatagtccatggtagtttcacactcaccattctcctgccttcacttctaacccacgtgctaagatcacaggcttatgccagtatgcctggctgtcatactttcttaaatatcaaagattttgtgttctctgtaatggttatacactattgagactcctgctttgctaacctaaatctttttctttgtatgtgtttttttctgcatatatatatgcacatacacatatgcagaaaaaatatataattaataataaaatagttgaaaacatgacttttaaaactaatgcctcctttttttttatttcttctttgtctttctttccttcctccctccctctctacctcccttgctctccctctccctctccctctccccatctctcatagtccaagctggctttgaacttgttgtttgttatcctgactcactatccagagtgctagaattacagttgtgggctctacacccagctctgtaatttgtctttcaagttaaaatgttcatcatacaaagcagtggttgtcaaccttcctaatgctatgactgtactgtaactcctcatgttgtactgacctccctaaccataaagtcattttgtggctacttcataactaattttgctactgttatgaatcgtgatataattatctgatatgtaggatatctgatagtgacctctgttaattatctgatatgtaggatatctgatagttacctctgtgaaagagtcatttgatcccccaagagggtagcaacccacaggttgagaaccactgatacaaagcttcatggtctgtgtgatatggaaaacagggtcagagctgggcatggtggcacacacctttaatcctcactggtagagcacttgcctagcaagagcaaggccatgggtcaggtcctcaaatctgggggggaaaaataagaaagaaatctgattatacatgttgacaatgatgtagagaaaaaactattagccactgctggtgacgggtgcaaattagtacatcaattatacgtttcaatttggaagttcctcaaaaagtaaaaaataaaaatagaactacaatttaacactgctgtttcactcctgggtatgtgtgtactcatagaactccataccttaccacagagatatttccaactccatatttattgctgcttgaattgcaaggaaatgcagccaggtttcatacctatcaccagattgatggatagtgaaaatctggtatatatttaaaatatttttcatctctaaatggaataaaatcataaactttgcaggaaaaatggatggacttagaatgtataatattaaacaaagtcacacaatctagaaagaaaaacatgaatgtcttaatgttaagtgcatatatatgtaaacaaatgtatatgtggttatagtagagcatttaatcgagagaacacaaaagagtattactaggtgaggaaaaacgatgaagtccaggttactggcactaagtcatgaagaagaatgtaagctcgtgatttttcactgtttttttttttttaactttcatgccctttcctatagaaaattaagtctttacagaataaaggttagcatttctttttctctgccagatctctgaaaaattggcattatcttcattttatttccaagtcagcataatcataatctgtaagcatctaaaataataagtaaaaaatttttgaaaaagaaaagctctcttcatttgggcagaagggcacacagttgtaattcctgtggaggtagatacaggagaatcacaaacttcgggccagcgtagactacacaaggagactccatctcaacaacagatgaggaattcttctttaaaacactattctaatttaaaacttgacttgatatttatttgctgatggtaaggatcttttctggtggtgggggctagtgcttgggcttggtactggctaggcagtcattctaccaacagacaaggtcttcacccaaaaactctgctaagcttcaggagatttaaagtagtttgggtttgtttttgtactgggaactgagcctaggtcctttcataagacaggaaaaatgtttaaaagtatatcccaattatatgccgttttagtcattacctttcagagataacatgttaacacatttatagactaaattataaagtacctgaggtttgctttgaaatacaatgaatggcaggtattgaaggaggagatgagataagaccctgtcacaaatgtgaagttttgggcagactgatccaagaagctcttggggataaataaataaagctgtcctctttatctttgtatggttaaaaatcttttcaaatgtgccatattaaatactgaggtcccagcagcagcagaattgttaacatactaagaaaattttcccttgccctactgatcatgaattttttcccttcttgttaatagactaaagacattaaagaaatagccaaaaaggcgcaggctcttccaaaggtgaactcgaagaggcagaggaccgtgatcttcacacaagggcgagatgacaccatagtggctgcaggtactgtgaggactctgtgataaatccagggttaaagagattaatggcaacaaagttgtatttttcttctacagcgagccatccccagtcatgtgccttcgacagtgtgactcccatactcctcccttgcaccctggggacgtgattttcctttcaaggttataatttatgaaaagccaattgataaagcttgtttactttttaaattgggggggtctcagtccagaaatctctttcttttcaaaacaataccttttacatataaaacccttgcatcagaataaaatacatttattcgattatgaacaagtcaaatccagaagtgtttcttctgaattttttctgtcacttttgatttgtttttgcaatactaggaattttatttttgacagtctgtgtattcctggctgtctctggaactcacctgcctctgactcatgcccaacccaatactagaactcctatttagggccttttgcatgctaaacaagtgctgtgtgttggtgagctctatccttggcctatttcttatactttattttatctaacagtatattttaagagaatgtctcagtgaataccccatactgaccttgaattccttgtgtaacccagactgaccttgactgaccttgaatttgtaatccccctgcctcagatccccaaagagctgggttgctaattataacctcggattttctttcaagaagacaaatctcatgtatgtttttataccattcatagaaattcaatagaaatttcatctagcaatcaaacatattattagttaattaatattttcaatctgaggctactttataatatattttagctactattcaagctaaatttaagtgttaattctttctgaatggttcatcttaaatccaatcagttagttaatgacttttataaatggtaatataattaagccaatttatttgttcagtactcagctgaatgtacattgaatgtagcataatctttaaagatctgcaaaataaaattaatttacataaaatgttaaatatagtctaaatattttttttcttaaattttagtctgggttctcattccgtagcccaggctccccttgtaatctctgtgtacccagcctggcctcaaacttggagcagttctcttgcttcagctttccatgtgccggctgggatagtaagtgcccactgaagtaactgtttaacaaaatggggtatggagagacacatgagaaatgatttactcatcctccttgtttacagacttaccaaaagacaaaatcaagatttccttcaaaagcagtcagtggatggcagttaagtgaaatcccatgaactaagactggtcaggtgttgattgccaacgttgggcattggatacaaggggaatcatggtgccattatacctgcttagatatatatttgaatttttagtgctgagagctattgaaaaactaaagcaaaatttcaaacacatttatatttgaattttttagtgctgagagctattgaaaaactaaagcaaaatttcaaacacattctagcatgttaagtgactttcccaaaaagataaatatccttgctaagccttgaattcttgaaggggcttaaaataaggggcagtgcagtttaggagatgcgcgtaagcaaaggctccaggtgctgggcagcccttcactgaggtggcaggcaaaggcatgtggtgaagttttgtaagaaagaagtcacccatgagagggtatttctacatgacacacacaggtcactcttctgctagtatgtagaccagttctgactggaaccaggtaggcttcttataggagatgtaaccctacctccaggtccataagatgctactgggatggtctttgtggagacatacgtttttaagtctttctgtatccaagatcatgtcgcatacaagcctcttcctcactctcaatttgcgtaattttctccagaatgaaatttggcctccctatcttataactgatttttttgtgtgtgtgaacttgctttatgctttattaactctattaagccactcctatgaatgcttctagtcggaaatttatttgatgcaagacatagctaatcttgccattcctacatatgaaaatgaacttagaggatgtggtatattgcaacgcatgataaatacaagatggatagagaatctgttcactggtgtcagctacaaaagcaaacatgataaatgttaatgcagttctgagccctgggataagctattcagtgtacacgcgtagctgagtctctttgctgtgttgttattcatggcagccaaataaatgtcaataataaaagagaattaaagattttcatttcccagaggcagtcctctaatacagcttgatctttcatttcatttgtaattcgttctcatgtcaggatgcaatcattcgccaggctctgggtgtcatgttaagtcatttaataatgattaaggacataaagatgcttggcctgtggggcaattcacagaagagatgccaatttgttattgttttccctcctttcctactgaatatggatcagccttttcccacctcctagcattaaaatactaatggaagatagggagggaaagtgtcccttaatttaccataagtgacattccagaatggtacaaggcagtgctaacacacttattaaagcactaattaggactcattgtgccttaaacctcacactgtggagtattttcaaatgatcacactgttaaggcatttagcaataatgttaacaaaaatcaattcccttgccattttttttcctagaaaccatctccttttgagatatgatctttataaaccactttttctcatagaggctcgtaactgaaaggccggtgctatcatatgcaaataaatcatcgagtgagttttgagtaaatgtaaaccttcctttttaaagtatcttccccgctgtaacaatcccactctgagcaccattaggatgggcatcctcggggaagtgtgtgaggatgccagtgaaagggtctggaggaaagctgtatatttcgaggaagtttcccctcaggtgatagagctattctatctgttctcatctctcaccttgagaatcatccagttaagtagtttgactcaagggccacgttttatgattctgtggaatggtggaagcagaataaataaccaaacaccgtcttcagtaagtcggaacttgatagatgccgctttttctttactccatccaaaaataccaagcactaggggctggacaaatggctcagtgcttaagagtatatgctgctcttccagaaggccctagtccaattcctagcatccatgttggacatgtaactccagctccaaggaccccaatgccctcttctggccctctgtgagtacctacctgcatgtgacacacattcacacagatacataaataaaaatgattttaaagaaaacaaagtgtcaaggggactggagagatggctcagcccttaaaaacactagctacatctaacaatgtcctaagttcttttattattggtaaatggaggtactaaagtaacctctcatcttcccaagtccttaaatcaacttcatcttagctctcctgctctccagacacacaaagtgctctctagcactggataataaaaaaataaaaagagtttgtgtaaaactcagaaagcacacgatacaaaatgatgcagattctaggggttagaaagatggttcagcagttacaagcacctgctgtcaggccattaggtctgagtttggatcccaacactcatctaagaaggacactccccatgttcaccagtagcccggttccaaagcagttggaaacagaaggatgactggggcttgctgccttccaccctagtcaagaaaacacaagccgcaggcttagagagagcctctgctttgaaggaacagatggaggaggataaagggagatacttaactccttctcctggcctccgcatttgtgtgcactccactcacacacatagaaaagttctatataaagtcttccctggagtggttaagagaataatgccagctacaattccagctactcctgctaccaagtattcatgtacatcaccttgaaaagtctagctggaaagctggttcaatggttaagagtccatactgctcttgtaggagactcaagttcaattccctgtgcccaggtcagacagctaagagctgtctgtcacttgagctccaagggatccagcacctctggcctgcccaggcacgtgcactcacgtgctcatgcccacactgagacatgcatgcatatacacacttagaataaatactattagaaaagaaaatgtcatctttgcagcaaccagctttaaaggttgatcttgttgacataggttggtgatagtacgaacaatttaaatgacatccatttagaatgtctgtatgtggtgtgggggattttgcctacatgcatgtctatgcaccgcatgggtgcctggtgcccaaggagtccacaagagggcattagatcccttataactggagttacagtcagttgtgagccaccagagatgctgtgaatcaaacccaggtactctgggaaagtggccagtgttcttaaatctctgactatctctccagacccactggtaaaaactggtgtctggggtaaggtaggggtatagtaatgcccgcccaccatggcataagtatagaaacagggagacagcttacaggagttggctcttttctcccatcatttaggtcccagggattgaactcaggtcagcaggtttggtaatgcctttaccctctaagccaccttgccagaccctctcccttcctctggtgagattttaataaatagtccttaccttgtgaacaagtgagttgttcctgcagagctttgttattaaccaagaagtcaaaatattgttggacctgggcatggtagctcatgcctatgatgctagcactcaggatactgaggcaagaattctcattcagactagcctgggctacagggtgtcttaaggtcagcctgggctacaaagtgagaccctgtcttttaaaaagcaaaataaaacaaaagtaatttagaatatcatgtgggataatttagaatatcctgacaaaattatattgtgcgtgatttgtatagtgtattgttctcagtcctgaaaaaaatacaacttcccccagctgccatgtttctctcaaacaggatcctgctgcaatgcaaaagagcccatactgagaaagtagtgttggtttctacaaggatctgttaaggcagattaatgcaatgcagactacacatattaaaacttacatattaatgcaatatatactaaaaacttatacagtcaaacttacatatactttcctttaaaatgccaaaaaagtgtactgagctctaatatgcagacttggtacaacgttttaattattaacttacgttcatgtaactgcaaccacataaagaaacacagccccatgactgtaacaggaggatcgtgagttagtttgatgataagatcacttagccggaccctctccaaaggagggagggatggggaagaggagagagacacagtaccacagcccttcagaaacccctctcatgctccccaccaagtctgccccactcctagaaaccgttttctcaccttctcttggtagctgttagtcctggtttggaatggattcactagtgtgcagaatttttgtatggcactgtttctatccttaacttgcacacttcctatctttttaacaacaaagatgaccccaggaatgtgatgtattttttctgttgcttcctgaatctttgccaaggaactcagtttcccttcctcggagcacggtattcagaaacacgaatctggactccttgagctcctcattgcttctaggcctttggagcagagcgtggcaagatgcgtattatgcattataataagctgtgcatgcatgtgacggtcgctccagcctgtgccctttccttgtttataactttccctcccgccttgggttctaaatgcattgttgcttgtcccatcataaagtcgttttggattgtttacccacacccttgtgagcgcctgttgtacttacagtaagcgtctgtcatctggagtcacttgagctgctgctttcttccatccacatgcgcagggttacaatattcatttgtgatacaggtattttctttggctggtatgtatattctatcttggtttccgtttatatcctggttaattttttttcaatgaatgaaatttatcctttgtaatgtcaaatcctacagatagtaaagattttgatctttcagtcccaaatttccaaaggattgtaccagtctccactctaaccagtatatggcactctaatgattccagtgctccgctagcatttgttactgtgtatctttttaatcatagccattctggtgagggcataatggtatttcaatatgctttggctggaattttcctggtatatagtaagtgtgcatgtttgcacctaagtaacttgtaggatatttcttttgaagtctctcttccatactggggggtcttttcaacttaaaattctttttttgtaccttgcatttgatatcatttttgtgtgacaagattttattatgtagcccaggctggcctcaaacttgcaatcctcttgcttcacccacaaccaagtactaagagtatagtcattaatgcttccttaagtctacttggatatgttggccctgttcccccttctcaacttaggcatttttctgtatttcattgaatagttttctgtgcctttattctgtatcttatttatctctgatcataactaatacttgatttcttttattaattttttttttgtgataaaacaaccaaaaccagcttaggggagggaagagtatatgtccacctacaggtcatagtttgtcactgaaggaaggcaggacaagaaccagaagtagttgcttgttggcttgccataaggttcatacttagctaacttgctaatacagcccaggaccatctgcccaggtgggttggtccttatgacatcaattaacaatttagaaaattccccacagacatgcccataagccagttcgttttgggtaatgccccaattgagactccttctcagatagccctaggctgtgtcaggttgacacttacagctgacttgggcactcttctagaccacagtcatagctttgatctctttctcttaacggtgccccagagtattttgttgggttttatttctttttggatggtttcatgtcaaccactccatctttccgtatcttgggagcttctcaatgtcgtggtgccttgctctctcacaccagtgttaataaatgaaggagggggcaaggaaagtgaagcagaataaagggaagagaatgtgagtgggggaagatagaacaagtccagttgtgaaatagattttatgatatgtgaataacactaggtaaatgggaatagaaatgaaaagcataaaagttttaaaagcaaagacatccaacagtactttttaaatgaaaagaaggaataaagagagtctgttttgtaaaataaggcaaagaaggagcatgaggtagtcactggagaagaacacttgccatcaactcaacaacctgagttgatccaaaaaaccctactgatgggctttgtgttttgttttgttttgttttgttttgtttttaagaagacaaagcattaaagaggcttttctctgagtctcccagtattggaatcagtctggggtgaggctggtttgctggattgtattgtagctcctttgtgttgcaatggtttctgctactgtcctatgctggctgaggactggtccagccacaggtagatatgatgtcagtgttaaactctgttcactttacagacttacttctttctttgtgtacctggagactgctagcccacaaatgttatattctgtagatcaggcaggttactcttctttccagagtaaaccacccccaccccatcctgcctggaacattcaggggcatcagggttcctgggcaagggatagatagttctcagtacataaagacgagatagcaaaaggcctggaaggggaacaaagggtaatgggcactctgcctgctgctgacagttttcaggccctgtgtgtcagtcaactatgggggaagaggtatatgattgccactctggtcacccactctgccagggttgcagatggaggctgtttccctcttcgttggctttcttttctccctgcttttaactctcctgtcaccagcttgatcacccatggacttcctgtttctatcctcagaagtagtctctgttaccctgactcttcttactcagtgttacctggagtaaatgtcccgcctcaccctgggcctcccacccctgatctgcatagctggaatcaacatcagagaaagagtgagtcccacttcccagggcaaatcctctccattgaattctgtatgacacacttgccctctgtgactcatgttttcatgaaggaattatttcaccatgttatttcctctgcatatggtttaaacctgtagtgcttagaaggttgcaggaggaacggtggctggagacccagagaacaaaggccctggaaggtctgtggaaccttcccagggttcctttatctgcctgagctgctgttgtatctcggtacccaggaacttctgagacaaaccatgaccttgactttctgcgctatgagattggatttgccattttatatctatcataaattagagatcattgcaaggttgctgtgaaggatcagctttgctgtttgttatgatcacatcaacactgtgtttgcagatagcccgtctggggtctgttaagcatttaaaccttaagccttcataacaaatccgtaaatattaacgatcttcagccttaactctaggaacttttggaacttggatcatggagaagtcagggcaggtttggaaatagactggtgtttcttggtttctatcataacatttgtatattcaaattaatcttgttagattttttttaatacaaagatctgttggaagaaaaggagaatatcatgtgttttcatttcatttcattttgagatcatatttacttttattttgtgtgcgtaagtgtctgcttgaatgtgcttataatgtctgtgcaataggtgcttgtaatgcctgcagaggccaaaagataaaatcaggtccctgggacggagtgcaaatactggaaggctccatgtaggtactgtgaaccaaacctggctcctccggaagagccaccagggttcttaatagctagtcatctctccagccctaaatcatattttttaagtacagttggctagagtaagcctttagctgtctctttgttggtatttgagcatatgaagcagatcataatcaaggagtcattagatttctttgacaggtggcaataagagtccaattcagcttgctacttgttaatttatctataaagcatggtcacatttgtcattattgacaatcatgacaattggtctgggttctgtctgctgtttatgtgtagtactatgtattaagaaatctcaagagaccaatagcacgggttccttccggtctgtctgggccagcgccctgagcagaccttgggtggaaactctacagccagccccacaacaaccagaggcagctccactcccaggtgctccaaggtgcccaggatcaaaggatcacaggatcacaggagcttggtcacaccaggatctcaaggtcccaaaggcagcttgactcccaggagctcagacacacccaggatctcaggattgcaggatcccaaaatcacaggatcacagagacatcttgacttggaggaattcagacacaaccaggatcacaggaagaacaggctccattcagacataactagggcaggtagcactagagataaccagatggcgggaggcaagtgtaagaacataagcaacagaaaccaaggttatttggcatcatcagaacccaattcttccaccataacaagtcctggataccccaacacactggaaaggcaagattcagaaataaaatcacttctcatgatgatgatgatagaggacattaaggagggcataaataactcccttaaagaaatacagaagaacacaggttagcagctagaagccctttaagagatttttgttgtttcctctttaagagttacaggaaaacaatcaaataatcgaaggaaaagaacaaaaccatctaggatctaaaagtggaactagaaacaataaagaatcacaaagggaggtccccaaaaaccctggattttgaaaacctaggaaggagatcagcagtcatagagcaagcatcaccaacagactacaagagatagaagagagaatctcaggtgcagaagataccatagaaaacattgacacaacagtaaaagaaaatgcaaaaagcaaaaagctcctaacccaaatcatccaggaaatccaggacacaatgagaagaccaaatctaaggataataggtatagaagagagtgaagattctcaacttaaaggaccagtaaacatcttcaacaaaattatagaagaaaacttccctaacctaaagaaagagatgcctgtgaacatacaagaagcctacagaactccaaatagattcgaccagaaaagaaattcctcctatcacataataatcaaaataccaaatgcactaaacaaagaaagaatttttaaaacaataagggaaaaaggtcaagtaacatataaagatagacctatccgaattacaccagacttctcaccagactatgaaagctagaagatcctgggcagatgtcatacagaccctaagagaacacaaatgccagcctaggctactatacccagcaaaactctcaatcaccatagacagagaaaacaagatattccatgacagaacgaaattcacacaatatctttccacaaatccagcactacaaaggataatagatggaaaacaccaacacaaggagggaaactacaccctagaagaagcaagcaagtaatcttttaacaaacccacacaaacataattccacctctaacaagaaaattaacaggaagtaacaatcactttttcttaatctcttaatataaaaattaatattaccaacatatcctaatcaattgaaattcaaaaatatgagaaattagaaatttgtcgactgtcatcccatggtctctctaatttggtaatgggagaaataggtccaatattgtacaacccatatatactttctgcttatttgtacatgacaggatcttgctgtgtgccacataatggtcttgaaatcatgcttcttctatcttagcctctttattagtaggagtgtttatttgatgtttttatactatactatggttttcagaagagcttacataattcaaaattatttatatcccgggggatctctccgggagaagctggggaacaaaagggaaagaagaatgtgatgnnnnnnnnnnnnnnnnnnnnnnnnnnnnnnnnnnnnnnnnnnnnnatatgtttttaagccaggcgtggtggtgcacgccttttatccccagcactcaggaggcagaggcaggcggatttctgagttcaaggccagcctggtctacaaagtgagttctaggacagccaggactatacagagaaaccctgtatcgaaaaaaaagaaaaatgtttttaagtgttaacaaattcagataaattgaaattatgtatcttttctcatcataatgcaacaaaacttaaatcaaaaaaaaaaaaaagaaagaaaaaaagaagcatttttgtattaaaaaaaagaattgacaataagggggaaactttatgaaaaatcatgacataagtgctaaactaatgcattttgggttaaacaaatgtcctgaagttaaaataaaccaagtgtgaagatggtgatcacctatgggagctggtgtcagggcacggctcactgtgctacacagtgcctggccagagcacctggagaactgcttttcagacacagggggatgagtgtgagccgcacttatacagcagaacaatccttgagcatcttcaaagacctttgactctgcacctcttccttatggaagatccactgttcaatccactcacatccatcaacacacaaagccaaaggaatgcaaaatataaaatgcactttaaaaatctactttcaatacagtgttgcttttttttattattaaaaaaaagaaatctcaattcagatttaaacattgcaacttttcctcatactgttactctgtatttaggtaatagaaagatagaaatacctgtttcctgttggggtagtgggtttttttctttaggtaaattgtactaattgtggttttgagtgttacttcttggtttagtggttaaaaaaattaaaagttaagatagattagagatacaagaagaaggtgtagtggttcagttaaatagaagagaagaagaaataatatacatgcaaaactctatgtctttttcccaaagagcatttatttatatatgactaataaaatatacaatggaatttttaaaatatcatgtgtattttacccaaaactgagctgtaaaaataatgcaactgtgagtcatgtcacactagtaatcagaaagacaaatgggcgtgatagacagtaccttcctagcacaaagccttgagtttgctctcctatggggaagagctttctctgattttggctgtttggtttgagtttggtgtttggattgaacccaacttcttttacacatagtaagcatgtcctctagttaaacctccaacctctcgggaaccattcacaaagattagggtgtgtagggcggagcagggaacaaagtgggggagagaaagggtagagagagacagagagagacagagagtcatgttgggtttcacctcccattttcctattcttccacttgtcaatacagtatccacaaaaataaacaaaataatcatctacaagaaaagcaaccttttgtacataacttatctctatttcctgtgtttcctttcttctatttgtttttacttttttgcattttcatactatatatgatatacaattcatatgctgtagaacttaccattgaagttatacaatttaaatctagacatgtttgcacatctgtaatcctagacttgggaaatgggcagaagcctgctaatgtgttcaaggctagcttgggctatataacccgaccctgtcttaaaaaaacaaaaataaattaaaattgaattgcatgaacctgtggatttttgacacattcacagaatagctagtcatcacaattaattttagaacatgtttatcatctccaaaagaaccccctcccaattctacccttgttgagcagccactaatctattttctgtccctatacatttgcttattctagaaatttccttccctaaaactgctttacagtaaatgtggtctgcttctaatatctaccatattgtttataaggtttatccgtgttacaggacgtttggctatttcatttctttacattgttatataatattccattcctcagtctgttactttcccatagtagataaacatggactctgtaacgtcatagaatttactctatcccagttctaaggccacaaatgcaaactaagccatctaggtcacatctctccaaataacgtagggaatctctccctgccctcccagccgtctgaggctcctggaagtcatgtcttcacaccctagtttatggctgcaacactgccacctgtgttctatgtcaccccatcgttgtctcttgttttcctgtggccatatgtcctttcttactaagacaactccagtagttggctagtctaacccaatatgacttcagcttgactggtcataaagaagacttccaagtaacctttcatcctgagacatcaggtggacatcagtttggagggcacaatcgccaatgcaatgccacaataagctagtgttatcaatggatgggatgttagccctatatttcctcatgttcaaataatcacatacataactattttctgattttttttctttgaaaatttgcaaactcttgatagcctttctctttttgtacttttcacttcgttggttgttctagaaataacaacatattgcttcatggggaatttgtatttgttttagtctaaatattcagccctagagaatttgttgatgtagccataaggtaggaattagtttagtcataaaaatattttctttatcatggaaaaatgtatctattatattgataaggttttgtaagttttagtaaattggattttgtggcgtcacatattcacatacatgaaattctctcttttgttcctgttcgcatctattcagttcctgtcccagtcagccagtgcttcactgaagtcagcttttatcctacaaatgccttactgctgagtccattatggagattgtctcatacgtttaatggtttgtttcatgtatacctttgtatgtctaatttttgtttttgttttgagctagggtctcactttgtagatcagcgcagctaaactcatcgagatctgcttgcctctgccttctgacaactgggatgggcatgcatcccaccttgcccatctgtttttctaatttttgctatagaaaattgaatgacattatttgtaataacgaaaataatcagaaacaaaccaaatgtccataaatagtaggatgaataaattgtttgtttgcttgcttgcttgtttgtagaatgggatgcatagttagtggagaataaatgaattactgtccaataatatgaaacaatatagcaaaacctggtgttaagcaaaatcagacccagaagaataacaaactgacttccaacgttgataggatagaaataactcctaccagatcaatcattcctcagatagcagtttaactggaaataaaatatctaactggcctcctggagacagtggagaatagtcaaaatcaagcagcgactgaagcagagtctacaattgtaggagaaaatgccctttctcatgtcttctttctttggggcacacacaagttgagtaccaagtggcttcccaaaatttgatataaaatgtactctctttttttccttttaagatgtttttaataataataataacatcatcatcatcatcatcatcatcatcatcatcattattatttaagaggtgtttcaagactaagtttctctgtatatctggctgtcctggaactcactctgtagatgaaactggccttgacctctgagatttgcctccctcttcttccggatgactaggattaaagtcgtggattaaatccctacctggatgtctttattacttttatttgtgtgtgtataaatgccatatgtatgcaggtgcctacaggtccccgaaagagtggcagatcccttggatctgcactcatgtctctccagctcactctaatctggctaaaagagctagaagaatttgtctgtataaagtagaaaatgaaagtcagaacacagaccctgcctgaatccctgggtgacctctcaattacatgtgtctcagtagatttctagctgcccagatgaggctggaagaactagactgttgtccttgctgggatagtttggaattagtgtctaggtatttagttacctatttgaaaaacagcaatcagtcttcttcgtggaaacactcagtgtgcctcatcaataaaaagtaactcttctttcttaaaggcccacaagtacttattgtagatttgtaagcttgtccccttttgtaaccacttaatgatgctacagtactatagagccatccatagtcaatgcacactggcatggctgcaccccactacttgacagctagctgcagttttgtagctgcctgcactactacatctcaataatctagaattatgaactctgaagacagaagtacttctatatgactactacagggttctttttttttttttagatttatttattatgtatatgagtacactatcgctgtccttagacacaccagaagagggcattggattcccattacagatggctatgagccaccatgtggttgctgggaattgaactcaggacctgtggaagagcaggtcttaactgctgagctctctctctccagccctactacggggtcttaaagggaaaattaatggaaaataatgcaagaaagtaatgttacagtgagatttaagcacttagctaaagagctagttcttagatgaaaagacgtggcaagggtccagagctaaaggtgttcagaatggaacgttgggagacgtgagtccatgctagtgttagatcagactggagcagcccaaggatgtggccaggacactgatttggaaatagaaatatagacatgcagtaataggaatgagcatttgaacagtgctaagctaatggggaaaagagtagtgagacatatttgtttcctctacagtgactgagggcctactgtgttccaggatctgggtaagctgttatgtacacagtgcgcacttaggtggaaacttagaatgcatgaaatagataaaagtgaaaggaaagagtttgttacaggtgactatgtaagggttaagtacccccaaagagagagcagctaacaggatgaaggatctgaagaaatgctttgtataagacttaatgtagggatcacgaattagtgacattaaatacctagtagatatgttctgaacagtggctctcagtgtaattcactagccagacagtggtggcgcacccctttaatcccagcacttggaggcagagacaggtggatttctgagttcgaggccagcctggtctacagagtgagttccaggacagccagggttacacagagaaaccctgtctggaaaaaacaaaacaaaacagaataaaagaatggaatcctgagtgggaggtgcttaccatatgttcttaaaaccaaccaacaacctagaattgatctttgaccattggcaccagattttcaaaattgtaaactgttaaaaaaggaaatcagatagaagacacatcagccattaaacttataagaacagatactacacgcctttaatcctagcactcaggagacagaggcaggtggatctctgagtttgaggccagcctggtctacagagagagttccagagaggccggagctatgcagagaaaccctgtctcgcttgataaaacaaaaatggaagttggtcagtgagatgattcagttggtaaaggcccttgttgtggaaacctggtggcctgatttaatacctgggacccagataaagatagagaaccaactccaacttccatttctgtactgtggcacattcacacgcgcgcacacacacacacatacacacacattgctctcacatacgttgtgcacacacataatggtagtaaatataagtcttttttttttaagatttattttggcttacggttctgagggatagagtccaacaagtcagggactgggtgacacggcctagcagcagggccaggaagctgcctgataacgtttttatctactctcagaaagcagaggtagggagcataagtgggaatcgggtgaagctatattgttcctgtccaaagatttatttattattatatctaagtacactgtagctgtcttcagacacaccagaagagggcatcagatctcattacagatggttgtgagccaccgtgtggctgctgggatttgaactcaggacttccagaagaggagtcagtgctcttaaccactgagccatctctccagcccgtaaatataagtcttaaaagaagacaatcacctgagtgttcttttctatctcagaagaaaagaaaggccttcaaacactcatagcattacaaaaagaaactaaattgttgtaaatgtcccaaaggcctggatctaaataattgaattaattcttctttcgtttgttttaaaatgctgcttgtttaaagaatgaccacttttgagaagtgcgtttagtctgtaattctgcattcgtataagacaggcctatcagccttcccagaagactggtactaaccagaacacttaaaagctactgttgggcctcagtactggggaacgccagggccaagaagtgagagtgggtggggaggggaggtggggtnnnnnnnnnnnnnnnnnnnncttgaaatgtaaatgaagaaaatacctaattaaaaaaaaaaaacggggcggggggtgggggaagctactgttggggctggcaagatggcttagcggttaagagcactgactactcttccaagggttcctgagtgcaaatcccagttaccacatggtagctcacaaccacccctaatgagatctgaccccctcttctgatacatttgaagacagctacagtgtacttatgtataataataaataaatctttgggccggattgagcagggacttagcaagcgaagatgaccaaagcaagcggtatcaactggagtgagcggggttgaccagagcaagcagaggtcctaaaaattcaattctcaacaattacatgaagactcacaaccatctgtatagttacagtgtactcacatacataaaataaataaataaataaatctttaaaaaaaaaaaaaaccctactgttgtctgcccgcccgcccagtggttctatagctcagagggtaccctacaaagaagcctgtcaaggtgaagtccacttctggggacatagcccctgcctccagcagttctgcccacaccattggagaatgagtgattacagaacggagacaactgtagatgctgcaagtctgtctatgggtgtcctggaaaagaccctgcttagtacagaacattaacttagtaagaagtacgtgtatagtagtcccactgtgatctccatacttcggaggcagggactgcaggatcatgaggtcaaggttatcctggggtacatactgcgtttaaggccagtatgtgctacatgagaccttgactcaaaaataaagaaacccatggaagtgtctagaagtgatggcttcctgaatatatacatgttcaaatttgccagactgcacatgttagctatgtgcagcttagtgtaaagcagtcatgccttggtgtaaatattaatagaagaaataaattttatcttaaaacagtcagatgtattttgtatcttctaccattatccacaaaaaagaaagagtcggcagtcaagtctagtgacagacacctacagacccagctattcaggaggcagaggaaagaaaaccacttgagcctgggaatttgtggccacagtaggcagcatatcagcatttcttctcaaaaataggaggggtgcgggtgggcctatctttaaatagatgtttacaacttgaggcaatccaggcagcctgaattatgaggaattgggtgctataatttttaactagagcattgaagcatcctttgttaagataagaggtatgtttcaaagtttgtgctaattcggcatgattatttttcttgttgattactgcaggctggatatgaacctggatgttaggcaggctttgtaatgtatcagtaacaataattagatgtttttgtttctgagagatacagaaagatcaatgtctcaggtgcccagtatcataatagatacctttaataaaacattctcagcctttgtacatttttacttttattaatgagctttcccatcagagactattaatgactttctggcaatgttgtcctggttgtgattgagaccaacatgaactcttgttattgaagatttatcctataggctgaacataaatatattagaaaatgtaggagatcctgaggaaacagaaactggaatgtgtgagctaagactttcttaaatgaatcacaatttgatgctccaagtgcaaccagtcagtcagttgttccaatagcattgctagagtctcaagtagttaaagatgtttatgtctagcacaattaaacagtgtaaaaacatctacacatggaggcatttgtgtcatttttgtgtaatgggcaaaatgactctatgtgtgtgtgtgtgtgtgtgtgtgtgtgtgtgtgtgtgtgtgtgtgtgtgtgtgtgtctgataccgtcattgcagtccgtgtgctacagcacctagagatggagctcattagtagaacttttgctagtaggctgagggccctgggttccattgtagggctagaggttgatgcagcaatttgatacttctttatgtagtgttttaaatgacaagctaaaccaacatagtggcttcattgctttgtaaaactgcttcacttaggatctgaggacttttcattaagcataaacaaatcaaaactgcctaccattacaatcagagtaacaagaatggttgtgtgggggtgagatgataaaaatatgatgtattttccatttcttattttctttgtcttaaaacacttgcccattgcttctaaaaagaaccttcttttaatgcaaatgtacaaatttagctaccccaaagtcacatgacctggtactggctaaagctctgggttttcattatacagtgatgactcaattaacaaatcctctatgaacaaaacctttttacccaaggctggccttggtgcagcaggcatgggggaaggatcaattttctctgagctagattggtggcagcagggactaatgaggcagggccttgaaagtggctctttctcagatctaactcctcaggggttggctagagctgatgctgagggcacggctgccctcctgggactgccacagcctggttacccaggtgttgaaaaaacaatttctgtgccaagaccatatgtgacttttgagagactcggcaggactcttgctttcggcagagtgttccttgtctgtgatgcgtgtgctcagaagcagcagagggagtcccatgcgctcgcaggcttgctctcgtcctctctgcactccatgtattgctttttcaattttctgaggctcgttttactcaactataaaatgaacaaactgccaggagagcctctaatgtatctttcgcgtctactggatgttatgtctgcgttaagaaggcaaactctgtaaagggccaagtagtaaatattttctgttttgtaggactcacgatctctatcacaaaggtttatctatgcctctgtggtgtagaaataaccatatttaacaatgtgtaaacaaatagatgtggctgtattccagtaaaacttcacaaaattggcagctagtcatgtttggcccacagactataacttaccaaccccctgttgtaagcattagtttaatgagaccatcgtattaaaagtatttgagtacagggtataaatcttaaggtctctagaatgccaagcatatcagtgtggcataatgcctggttctcttcaacactctgttctgttaagtcttcagattttctctgcctcgagggagaacaaggttatgttaattatctttctggttaaattgtgcttttcatagaatagtgtgggctctgaacctttgtccttgatggttgggggtctttaaaaataaaaactgccaagcttagcacaagaattctcaagtctccacctatccagcttttcatgtgaagatgagtgtgtcttctctttccagggctcggtagtttctctgcctgtcgggaggttcttgtctgctttgtcaagtccccttgtatcaacaactttacttctgtttccaacaaagtgaaaaagcagttagtgattggaataattaacccaggccaattattctcaccacagttaagccagtgataactttgtttctgcctataatcctagcacttggcaggcagagacaagaagattgaaagaatctttttttaaggttctgcattatattactggacaaaccgtacacccccccaatttaaacatgaccatgaccaagtctcaaagttaaaaatgttgaactccatctagtagaatctattactgcggttctgtataaaatctcggtttcaccattgtgtgactccttgcagactcggcgtcattctcctccagtgtctcctccagtgtctcctcttggagttgtatctaatctagttgtgatgttttgtatgcttggctcagggaatggcactgttaggaggtgtggcctttttggaggaattttgtcattgtgggctttaagaccctcttcctagctgccttcagaacaaaaggtggaactctcagctcctccagccccacatctgccttgatgctgctatgctcctgccttgatgataatggactgaacctctgaacctgtatgccagcctcaattaaatgttatccttaagtgaggtaacacattcacaaagaaactcacacaatatgtactcactgataagtggatattagccccaaacctaggatacccaagatataagatacaatttgctaaacacatgaaactcaagaagaatgaagactgaagtgtggacactatgcccctccttagatttgggaacaaaacacccatggaaggagttacagagacaaagtttggagctgagatgaaaggatggaccatgtagagactgccatatccagggatccacccaataatcagcatccaaacgctgacaccattgcatacactagcaagattttattgaaaggacccagatgtagctgtctcttgtgagactatgccggggcctagcaaacacagaagtggatgctcacagtcagctaatggatggatcatagggctcccaatggaggagctagagaaagtagccaaggagctaaagggatctgcaaccctataggtggaacaacattatgaactaaccagtaccccggagctcttgactctagctgcatatatatcaaaagatggcctagtcggccatcactggaaagagaggcccattggacttgcaaactttatatgccccagtacaggggaacaccagggccaaaaagggggagtgggtgggcaggggagtgggggtgggtggatatgggggacttttggtatagcattggaaatgtaaatgagctaaatacctaataaaaaatggaaaaaaaaatgttatccttataagagttgccctggtcatggtttctgttcacagcagtaaatccctaactaaaacagcagttttcatctgactctgttgaggaattaggactattttgcttttgtttcgtggctgggaatctctttattatagatgtcttgtgagagagtcaggaatatggaaggggaggggaaacagttaaaaaaaaactgagcttgtaacacaaactcataccaccattttgagatgagacagaaggctcacaagttcagtccaacttgggtaacttggagctggagttcagatacccagaatcagcataaaaacctggcacacgaggcctgtgatcccgacactcaggagacaggggcaggacaggggtgtctctaaaacaagctggctagctaggctaactggaattggagcactctgtgtttagaaagagaccctgcctcaataaatagaatggggagctgccaaggaagatacccaaaatcactctggtttgaacacacgcacacacccatgcatccatttatatcacgcacatgcacttgtgcacacacatgcacatgttcttcatatctgggttgttttcatctcggcactctttgggctcttccttcactaagtcattggagcatgagtttcctcctggcctattccaccagcagcaggtataagcacatcagatctaaccgtttcctaggaatcacagcttgtctagataagcaggatcaatatcctagcatatgagaataggctccacacctctcaaagagtctcttctgtaaagtcaaaactatagccccgtacaccctcctgagaacctgagacagaagggttaagagtctgagacaagcctagattgcataacaaaaccccatctctaatgaacaaaagcaagtctatcatagtgttgcatgttatgtctgttatcccagagagaccacgcatacctgacactcatagcaagttgtaggccagcctgggacatataagaccttatcttttaaaaaatgtaaatgaacaagggtgtgtttgtgggtgtatttcacaataatttaaaatatattattagagctggatgtaatggcacacacctttagtcccaggatcagaaggcaaagacaaggggatctttgaaaccagcctaccagcctggtgtacagagtgagttccagaacagccagggctatacagataagccctttatttggggggaggggggaccaattataaaaataaataaatagattgccttttgctatgcagatgaaccctttcttggaaaaaaaagtatttataaataaataaatagccttttgtaactctcaattgcagtagtgttttccagagagtacatgatatggtaacaaattgtataataaaggtaagagaatctatctttaatgtcttctcttaaaccagacattaaagagattagcaaaactctaaatcacgggccagaagatgactcagtaaagcattttccatgaaagtatgactatccaagttagatgctcagcacctatataaaaaggtgggtgcagtgttaagcctccataaccttagcagcacaagtggacctgagggcccctgggcttgctggccagctagtctcaccaaattggcaagtttttgtgagggacccagtctttatttatttatttatttatttatttatttatttatttattatatgtaagtactgtagctgacttcagacacaccagtagagggcatcagatctcattatgggtggttgtgagccaccatgtggttgctgggatttgaactttggaccttcggaagagcagtcgggtgctcttacccactgagccatctcaccagccccaagggacccagtcttaaaataataaaatgggaagcacttgaggaaaataccggatgtcgacctttcacctctgtatgcacatgtgtatatatacaccctcacaaattaacacatatggatgtatacacataaaatgtaaattacaaataatattttgttggaaatatatagttcttttttagaaaaacattaaaataggtaaagtgatggttttaagttaaccatttgaatttctgatacaataagattttataaggggggtggtggtggtggtgtggtggtggtggtggtggtagtggtggtattttggtgtttgagacaaggtcttccctgtagctcagactgactgtcaattaattccctgcacttctctcttcgacctctcaaatgctggagttacagtcacgagccaccacacccagctaaattataatataataagtattaataatagctcgtgtgtagcacatacaaacagtgtttctaagggcctaaataatttttgtaaagtattacagaaactgaagccaaaaagtttgagcagccctaccctaatgtaatagctgtcattgcagggcgctgatctcacgcttactgaactcctcagcacagttccttacgtgaaatagctcacatcccccagagagaacaaatgttaacaatttagtggttatccttccagacatctttcttatatgcatacttactgcataatttcataagtctaagatcactctgtgttcttccaaactttttctcctgagacatttcagtttaatttttctccctgttcactctctgaatccatataaaatcctcacgctttgatgttggaaaggttttagggaccgtctatctgtgtctccctagctcagttcaggaatcttctctaaaacctagtgatctgtttgcctatgtttttaaaccctagttagaagctctttctgatgggcagaaattgtccctattaagatgtatcgagtagctgatctcagcttctgaaagccatgcagaatctgtcccagctctctgtgtctgtggtgtgtgtgtgtgtgtgtgtgtgtgtgtgtgtgtgtgtgtgtgtgtgtctgcatgaatgtctgtgcatcatgtgaacccaatgcccactggggccagaagagggcatcagatcccttggaagtgaagacaggtgagagtcaccttgtgagtgctgggacccatctctgagtcctctgcatggagtgtcatgtgctcttgcccactgagccatctctctggctgttgttgctttgtttataactcttggacagtaagtgtgttctttcaaagtttgttttgtggactggtcatctgctttaggctaatttgtcttgttaatctcactgagatgttttatttgcggttgttggagaaatgacttgagacctagtacaatacatgtatgcatgggagcacaggagcagcggcccactggagacatcttaatttgagactagcaattctgatggttggaacgtccagaacagtcccttgccgaggtcttcctgtgtcttgttcgccacccttaattctaaactcctctccaagtatgaaacaccaagctcccctccctagttactgcctgtgtatcctagtctggccatttttcattcttttgttatgcattcaagcagatttgtctgtctgtctttctgtctgtctgtttgttgtgtgataccgaggatggtacctggggtcttgcacatgctagggaagtgttctactactgagcatcatccctagcttacatttttcatgtatatattttttgttgccttttgttgattataaatgaataaggggagccctaataattcatgactacttcctgctgaccttagggcatgggcaaaaactggaccattggccaaatccaggaacagctggttgtttgattgctgtccaggttgtgggcccatctctgggtaggcatatgtaggctcagctgaagcagtctgtgaggctgggccagacctgttagtaactgttttggagctgtcctggatgcagattctgagagaacacctggatgttaggggcagaagataaaagtttagggagaaaacccttttcttgggtgtacatttgaaattcttaggcccatggtcttggtagttggagaaggggtgggggagccccagggaaagagaaaaagatcccacccccagaaatgggcaggtgggcgtggaaacaggctgttaattaacagtacttatattgagtccatttgacctgcgagaggtgaatttaaatccttcataacttgcatttacccatctcggaacatcttcctccacatttaaacactttcttagatccttactggttttggaagctttcatatcctcagattttacaatcccttgaaagctttcacaatagacgcccttctcttccatgcttgtctgctgccacagcttagctgcatcgtctgttccttctgagactgacatggcggggcagctcttattaggaacttgctagatggatcttagttaaacagctgttagtgaagttcctgtatccctgccattcacatttcattagtggaagcaagtcatgaggcccagcttgagagtaattgggtagaaaatacagtctttatgagcagattgcagttctcccacaggaatgggcctggccgagagggacagtgaatgtaacttacaatagtcccatttcccttcatatataattctactcttcctatcataaaactgatctttagcatgagaggtcttaattttatatgctatttaaaccaactaaaaccaaaaggccaaggagctgaaaagaaatgtctttttaaaaaccaatcataaacctgacgtaacagctcacatctttaatcccggtatatgggaggcagaggctggtgaatctacgtgatttcaaggccagtctggtctacatagcaaattccaggccagcaacatagagatagcctgtcaaaacaacaataacaacaacaaaaagactgtggtgcctttgagcgcattaattccatgtttgccgtttctttcacttgacattttgctaaattatattctcattgaacagcccctcatccacctctctgagatgggatattacaatttatagctcaggttagcctcaaagtctctttagccaagactaaccatgaactcacaagtatcctcctgccttactttcctgagtaatgggattatagaaggcactaccacagtcaccagatcatatatcttacccaacttgtcatatggaactctgctcttcaaggagttaaagatttacacattggtctccaggggggtaataccggtcatgccactgtgcttcctctttgttttgtgtcttcattaggttgaaagtttctctattagcttttctaggcctctttactcaaatttgctaatctgttttcattgttctccttaccattctaattcgccatctctctaggtccatgtgcttcctcttcattccatcacccatgcctctgaggtttctgggtctcctttgtatttttttgtatctttctagcaggtctcctgttactgctaagggaacttttacagttttcttcagtgttggtcataccccactgggacacacatcagagcagtccccaccactcttaaatgagcttttatcattttatttaattttattatggactttgtgtatagatgagggtggaggtgtgctatatgtgcatggtaaaggaagttggatatcttcttggatctctcagtaaacccagagctcaccagttgtctggcctagctgaccagagctctggcaatctgtccatctctttcccatcccaggcccagcacttcacatgggtaatggggatccgaactcaggtaggccctcatgcttgcgcggcgagcattgttactaggtgcgcagctgcccagcctcatgttgtgcttctcaggcaccgtcttcttttccacctatggataaaatacaatattgaataacattggcaactttagtatttttaacctaaaatctgatagtatttactaagagatgggaatgagggtgttttgaaagagagctgtgttctctcttagatctgtgtcaaagctgtcagggctgtatctccgtaacttctgaataattgctgctgtctctatacttgctctaacagcaattgaaccccaaagaaatcacaagattcccaattgttagctttataaatgtactgatgagtaccttgtttggtaggataaaagcctgggtaagtgatgttcccacctgtgtggttcatttcaaaatattgtttgcctaaggcattgttgtcggtgacaaccgaacaagaacttttaggaacacttggctatccaataatggcaaatttcaaggctatgcaaattgtgccagttcagccccctctcttttctctattatcatatcaattgagtcagttcatagtagacaaagcaaggttatgggaaccacctagagtatcatgcaccatttaacatcaatgcaacatacacgaacatctgcaactccagccttattaagaggatggaatggaaggcaataaacagctttcttcaccatttaattgcaaaatagtatttcctaatgtttgcattgtttatcaacaggaacttcatcaataattgtataattacagttgcctggattacagtgctctcgtgcatcttgtcatttattacggagtagtctgagtttaatctgaatttgagcacattattcaaggctaataatataaaccccttcaaatgcgagttgcacaatacagatatcttgtgtagtgggagaatggtgtttataattcttcagctgctgtgaggattaagctaacacaggggaaaaggaaggctgaaaggcagagaaagctgagggaagccactagttagatcaaacatagaccttctaaacacgagcataggttgtgctctttagaattaatcacaagtaattagatgtttgctttaagccaaaattgtgctgaattaaaataggtttattatgctgtggtcttcccttcaggcattatttaaagggagaaaacagtgaaaattacaaatatacatagggaaaaaaggtatggtggtcagttagaaatgccaaatgcagaagaaagcctttctctgtctactcaggttcctgttgttgcttcaaagcagcaatactagtgtgtctagtgtgtacattcctccgccaaatactacctccgtggacgagccaagcagatgcagagaagcaatataagcttagttaatagagtagctagtggcgttgccctgtaagaaagagaagcctggggcttgtgagatggctcagtggttaagatcaccgactgctcttccaaaggtcctgagttcaaatcccagcaaccacatggtggctcacaaccacccgtaatgaaatctgatgctctcttctggagtgtctgaagacagctacagtgtacttacatatagtaaataaataaataaatatttaaaggaagggaagcctgagaaacagtgggtgcattgaaatcatctaaggcaagaatcttgtctgaactttttatattttaagtatgaaaatctcattattcaggggctggagaaatggctcagtgagtaagagctctggctcttccagaggctattctcaaccaatcaacagtcttgatttttattttaatgtatttattttgaaacaggatctcatgtatcctaagatggcctcaaactctctatgtaactgaaaatgaccttgaacttctgctcttcctgcctttacctttatccaacaccctcacatagatacacatgcagacaaaacaccaatgcacatgaaatcaaattaatttataaaaaaagaagaggaaaataatttttccttaaatctattttatacccaaggaaaaaggtctaaggcttcctcataaagtcattttttaaaatgttttcatttgtggttatagttccactctctccctcctccaaataaaaatgtattaacttatatattggatgggtcttgtttgtcctaggctattctcaaccaatcaacagtctgatttttattttaatatatttattttgaaacaggatctcatgtatcctaagatggcctcaaactctctatgtaactgaaaatgaccttgaacttctgctcttcctgcctttacctcctgagtgctggggttgattacaagtgtgtactatcgggctggagagatgactcagtgattaagagcaccggctgctcttctgaaggtcctgagttcaaatcccagcaaccacatggtggctcacaaccatctgtaatgagatctgacaccctcttctggtgcatctgaagacagctacagtgtacttagagacaataataaataaatcttaaagaaaaacaaaaacaagtgtgtactacctcagacacaaccgagtgctggagattaaagcagaagcaaagcaaacataccaaccaaactatactgacgactcagggtttccttctttggttccttcctccgtccctccctccctccctcccttccttaatttccttttttagatgaaaggacaaaattatcattgtaaaatatccacagaatagaaatctgttccctctcctattttcctgatgtgctaatctatcatttcctccttgcaaaggaagctaagaatgagcttggtagggtcgtttgacctgtagttacttaacattacgctacagaacctttttcagatactgcgtcagcttctgctgagaagcctttaactgaataccctagcaagaacattctctaaactggactttgcaatgaaaggatgtactcaaccaattgagactcaagtatatacctttcctttgaagaagaactgtacagacattatttaggggtgttttttggaggtatttatcaaaaatgctatgataacagctttgtcctaatgagccccaggctctgtttagggaataatcgataaagttcaaattaatgttccataattcacattacaatgcgcatgtaattattctgagatgaggcaaaccctatgcatttaatttacagctgtaattaagtaaactcatttaatactaattaggtgagcctaaaaggatcataggtttgtgtatttaattaccaaattacaattagcaactgatttctgcaaagctctctcatcttgagctcaacactgatctctacctacactactgttttctcctcatagaccatcatcactaacgcatcacacactgtagagaacctacttgtggtttgccgactgcaagaatggccttaagaatagagaaattagccagccatattgacatatacctttaatcctagcattcattggagaggcagaggcaagcagatctctgcctatgaggctagccgagactacagagtgagatnnnnnnnnnnnnnnnnnnnnnnnnnnnnnnnnnnnnnnnnnnnnnnnnnnnnnnnnnnnnnnnnnnnnnnnnnnnnnnnnnnnnnnnnnncccacacacacacacttccctgctgccaagagaataaaaaaagaaaatgtagaaattgtagaaattgggtctggagtgatgactcagcagttataaacacgcacagcttgcagaggactctggttttgttccaagcacccatgttggtgcttacaaccatttgtaactccagcttcaagacatcctatgccctcttctctctacccctacatcaaaactttttaaggatatgaatattaagctatcaagaaaataaagttgattcctatttttaaaatctcttaaattctgtcaaccaacatttattaggtacctagaatcctaggcttcttgctgtgtttggacgattattcccattttgttctgctatttttaagtctataaccaaagaagagttatctgttacctatagggacgtctttaataaacttggaatgtgctagattaaagttcacatattccactttccaagttcgacatatgctttaaaaggtgaaaaggcttgtgcctgtgactatcctgaagttctcacagtgtctctgtcttacctttgaggagtagaaacctcccagtctacagtgtgcgccctactctttcccacggtacgcaggggtggcactgttgtcaggaaatatggacctcccccttacgacactcagattgaactagccagcttcctggtcagcagccactataggttagtggatagtaatggctgacacttacattgtgacttacagctcaaaaaactgatgaacaaagtaggccaggaagcataggcctgtatgtacatattcaggaggccaaggcaacagaggtctcaagttcatgggcagcatgggctaaatggtgaggcctgtcccccaaaagagagagaataaaacaaaagaacagcagggcgtggtggcacacgcctttaatcccagcacttgggaggcagaggcaggcggatttctgagttcgaggccagcctggtctacagagtgagttccaggacagccagaattatacagagaaaccctgtctcgaaagaaagaaagaaagaaagaaagagagagagagagagagagagagaggaagaaagaaagaaagaaagaaagaaagaaagaaggaaggaaggaaggaaggaaggaaggaaggaaggaaggaaggaaggaagaaagaaagaaagaaagaaagaaagaaagaaagaaagaaagaaagaaagaaagaaagaaagaaagaaagaaagaaagagagagtgttatgatttgtgaacaggccatgtctagcaatgccatttgcatagtggcctctggtgcagtgttcttttttttcttttttcttttttctttttttnnnnnnnnnnnnnnnnnnnnccacctgcctctgcctcctgggtgctgggattaaaggtgtgcgccaccacgcccagcagaagacagtgttcttagactgcattatctcccatctttagaagcaaaggtactgacttttttatcacttgatgcaaaattaatagtttgatataactagcaaactaaaggattggtacttaagagctcctgttttcttgaagaaataattgtggtttaagaagagcaatggagccgggtgtggtggcgcacgcctttaatcctagctctcaggaggcagaggcaggtgaatttctgagttcgaggccagcctggtctacagagtgagttccaggacagccagggctacacagagaaactctgtctcgaaaaaccaaaaaaaaaaaaaaaaagtatcaaaaacttccttaaaaggaaaaacccctttttacacatggctggagagatggttcagcagataagagtgttcactgacccctcttcagaggacccaagcttggtttgggcagccatatcaagaggctcacaacagccttcactccagtcccaggatccacaagttctacactctatagacatgtacatgcatgtggtatccgtaaacttaccagcatatatacatgcacatactcacacacacatgcatccatacatctttttaaaaatgcacaccaagcacagagtagaataagtttttagagcactggttccaactcttgttatgctggttttatcatttctactgcaaacttctttttttagcagtaataaatacggatgagacccagggcctcccacatgcccaaccactgaactacatccctagccctttcaaaactgtttcatattcaaagtaatccatctattctcttacctacctatatccagcactgaaaattcacattaactagaagaaaatgtgaacagagagcctcctacaaacaatagtatatagttagttgatctgtgagcccgtgccatcagaaacagcaatttgcttcatccactctttgagaaagaaccttaagatggtaccttaagtttgaactcctcttgctgtagtcttctgagtgatggaattgcagctgtgcacctgtatgtctaagtgagaaaccaccacgttaaatgagacctggatcccctatgtctctactacgtctcaatttaagataagtaatgcatttttttcaggtattcataggagctgtgagtgtttactgtggactagcttttcctctggctgctttaagctttatacattctgatgtcacgagtgcgcgcacacatacacacacacacacacgtgtgcacgtacacacaaacccttgaaatagcagtaatgcctctctcttaaaaaataaagacatttgtatttactgtttttcttgtgtgcacacagtgtgtgtggcgctcagagggccaatgagaacaactgtgggcttgttctctgcttctactatatgggtttagaggatggaattcaggccgtcaggtttggcagcaagcccctctatccactgagccatctcatcagtctcagttgtcttgtttttaaacctcaagaaatcagagagagcttagtttggtttgccagagaacgacgacaaagctgtatggattataatcttacagagcctggctcgtcctcgtaatcataatgtcatactgccctccttatctatgggattttatcagttaatttagtcaaacttagttctcagcaccaggcttaaaggaatttcaatttccattaactgctatatactgcttaatgaacacaaacagcagcattaatgcatgggaagctacctgcttctttctcattcatcttgtcccaaagacctgctgtgcccatgagcccctaggcacttgacaccctgtgagcctcagtgtacttgtttataaaatcagttgacagcacccaaagtgtgggcctgaaactggcccgaggtgtcgtgtacagcacttagcgcagcaggatttcaccaagataccattgctgcctccatcttctgatgcatcaagcccaaaccttggacattcagagtctctagaaatggctagaccctatcttacagacgcaaaccctgttctctgtgtattcctctcagcatctgcagctttcttttcctctctctattatccacatcctcagaactagctgaagtctcttctgcacaaagccatctgagttggctaagttcatcttgtccctccatccctcccagctcccactgcagttacagtgggtgatatgctgtctgtagttcagagattccacacaggccaggtctcccgcatgcttctaagcactctgcaaagacagattgtatctgagtacttctcctgtgtctcatctcctccaaagaacttagcagagtataaagagcttatagctgttgatcggtatttgttgcctgaagaaagtgaacccctaccttataaaattatatattagattgtttcccttcagtacagtgtttcatcaaacagatatgttatatatgtatgtgtataaatatatattatctataataataaatgtgtgtgtgtataatgactatagaaactagatgtcttctttcaaacttgtacaattcaagctggggatggtagctaatccctgcaagttcaaggctagcctgggtttccctaatattttctgtgtagctgtagctgtcctaaaactcattcagtaggccaagctggccttgaactcaaagatcctcctgcctctgcctgccaagtgctgggattaaaagtgtgcaccaccacacctagctggcgttcccagggtttagggcttctgtgttctttctgcttgccatgggctgattcttaaccacgcatctgacccccacgccagtgtcacatggcatcactctttctccccctctctgttctccaggcagattgaagtcctacaggttgcctgtcatgaggttttcctttcaaattctagtaaaattgtccttgagcttcaaaaacaaacaaagcaacaatgaaaacagagtgttacactccgtactccagttacagagcctattttaggtgtagcacagctagcccatccaagctggtgctggccggcctgcagcctccatacttacgtgctttagcctgggattgtcacatggcttgctcctccttgtcactcagatctcacctcctcagccagactcaagcttcacgtcctaaactagctctccgctttgctactggtcctggtgtaccgtttcactctctcaatgtcatctgctgataactcggtctgttccttcctttgttgcttgagtagctagtgtaggccctgtaaaagccagttttgtctgcaccactgacatgttcatgttcagtctccaatacagtccctaacatgagacgagatttttaataaacatgtattaagtaaagaagctgagcccaaaccaaacttaaaccatggttggttttagattttaatgcaaacattcccgccattccactgagcctgcttctcatgaaagacataccttgagaactacagtaagaattaatgctcaagataatgatattcagatgtgctgtaagattctctattctcagaaaaaaattcattgagttctataaattaattaaagcagggatgtcatggtatattaatatattatgttaatacatttagaaaattttccaactaaaaagactttctgctttttctttagttaaccagaaaattaaattaactcagagctcctcattccctaaagtctttgttaattaggagtgttctataaatctctattattaggagagtttgtcatctgtttcattagcctgtttattagggcagtctgagcagggtgtctttgctcatatcctgatgcgtgtgtcctagtgagaagaaacatttccgccgttctcatttctccccatccattaaggcgcatttcatgctattagtataacaacgtggtttgtttgtgtcggttccctgggtcaagtaggaatgatatcgttgatttggctattaaatataataattaaattcaaatggtatgaaagataaaggtttgaatgctttgcagcattgcgtgtgatgagggagactgaaggcagcctgcaggctatcaatgacggtctgggaagtaaatgagagtctgtgcatacagtgactatagggctcagcaaagcacaaaggcatgaagagcgtcgtgtgtgtagagcagcctggtatttcaatatcttctttaatacctccaatgtgataacacataccccacaactcacttatttcaagtattcattctaagagttgctcttacgttgacagtgtgcaatcattacattaacccgttgtgaacatttttattatctcaaaaagagacactccatggacatttgcaatcattcccaactttccagcctcatatcacacactacctaccctctccacccaatccttatatctctgcttgcttgcttgcttgcttgcttgcttgctcgcatttgtgacattctcactatgtaaccttgcctggttagctatgtatgctaggctggccttgaacacatagatatctacctgcctctgcctcccaagtgctgtgctcaaaagcatgtgccaccgtgcctagccttgtaagctcttaagcataagtatttgatcagaacatcaagcatggctcttattggaagtctgaaagcaacttgcaggagtcagccttcttcagtcctgcaagtcctgcaagtcctgcaagctgcaagtcctgcaagctgcaagtcctgcaagctgcaagtcctgcaagctgcaagtcacagtggattcaggtcaccagacttggcaactagcgccttcaccatctgaacctcttgctggcccattctgatttggaaagtgtgtgtgtgtgtgtgtgtgtgggtgtgggtgtgcgcatatgtgtatatatatgtacatttttgtgcatatggagcccaggagtccaccttaggcagtcttcctcaggaaccatctactctttgtgtgtatgtcagatatttattttggtcttgaccacttaaagtaacttatatttcagcctggtgccagcctatgttaaaatatcaaaaagtattccttacctcctattctgctgcacatctttaatctcaggatttaggaagcaaaggcaggaggatcactgagttcaagaccagccgggtctgcatagtggtctacccagagagatcctgtctcaaatacatatatacatacacacacacactcacacacacactttctgttttgttttgttgtattttttgtgtgtgtgtgttttatttctggctgaatttaattcggattgcttgcatgagcataagtatagcattatttactaaagagtgggtaatgtaccagcaactgtcccacagaagaagatgtgtctctccccactgtaaccactagcaccaatagcttttcagagaggagggtgggacctctatcccttccttcttccctactttgtttttgtgggggtttgtttgtttgtttgtttgtttgtatggggagggtttgaggctgaatcttaccttgtagccttgtttgggctgcaacttaaagacattctcctgcccctgcctcccaaatgctgagactaaaggcatgctccaccacacccagctttgtattgtttttttatttttatgagttttgtatgtctttcaggtgtgtgtgtgtgtgtgtgtgtgtgtgtgtgtgtgtgtgtgtgtgtgttcttgtgtgcaggtgcacacatgcacacaggtacacatgttgaagtcagaagacaactttcaggaattgtttctcttatgtacacagtgtgtctcttatttttgccccctggcccataagcttctatcttccatttcccaggggtgctggctttttatgggtttccaagatcaaatgcaagcctcatgtttgccagacaagcagtttaccagctgagccatctcaccagcccccattttctacaattgttacccaaagtattttatggacatgtccaattattgtataatgtaagcccattgttaacagtgactcattaacttcattcattctcttcaggcccatttgttctaggtttatagacgttcattccctatattgtgtgacttatacttgaaagtaataaaactagatttctctataaatatttatggtgtagacctttccctaaatcaggctgcagctctttaccagttttttctaataaagtccgcttgcatctctttcttttttctgcctgtataagcatatgtactgcttgctcctagaaactccaatcctctagatttgtaccatagaatccagttaattacaacactgtttattgccatgtcggctctagagtcacaaagtgtggaaagtttaattgcttcaaagtttttggtttttgaaacaagattttgtagcccaggctggtcttaaactcactacatagcccaggttggcctctgttttcctcctgattcagcattccaagggttgagatgacattcatgagtcacctaaccattgtcaactagaattgaatagatgattctgggtttttaacatccagggttatctaaccttttgacactgcaattcgactttgtcatctgcaaatctgctgggccaccttcccagccgcccgagacacatgacacatgaagcacatgaggccacagccagtgctgcctgacagcgtacttgctaagtagaccatttgtcttcctgaataccagcgttgctgagaagattgattttgttgggttttgtttggttttatgagataggagtctcaatttgtagcctaggctggcctccaacccaagatcctcctgcctttaatcgctgcagtgctggggttacaggcaggttttatcacactcagcaaagtaggatcattgttttctttaacgtgtttgtgtctgttatggtggtgaatctctcctagcgctgggaatgaacacctgtaatcccagagcctagaggatgggatacccaggaaagaaacactactctttgtcattggtcaggctatagaaaatggacaagcctggggtttagagtacagccctgtcctggtaaaactgaagtttctagtgtgtgtgtgtgtttctagaaggagtctcgttataggaaagactggccccaaactcctaatgctaacttctgcctttgcctcccaagtgctgggattgtagccatgtgctacacacctgcacacatgtgcaaagtaggcacacacctcagctcttaagacctttactctctaagatgtgccttaacattcctaagatcttctacttcctctttacactgaggtgagattgaagtttgcaagtcattagccaagtctgtctccataggatgcaaattcgtcacttccgagggtccagctccaatcagaaaacactgtgtaatcattcacacatgtctcctgggccagagttcatcagtgtccagagctgtcatatgccaagcttggagtactgtccggggtattctatagggacaaaggcaaaccctgcttcagacaggccacactgcccctgctgttgttctgcccctgcattctgtggtatctgagccttttgttagctgatgggcagttggccaaaggtaaccagatcatctgtaataaaccaactaaaatcaataatccttgacattgaccttaagtgttgtcacagaataattgtaaaatttctattttgccattgtgatttttctgtagaaaggcactcaacacttatttacatttaaattttgaagcttttttggtggatccaaaatttcacccaagtaggcttgaagatttattagggctcatgatccagtccacagaagcacttcctttaccctatagtttctgttcaatcacatgagctgtccacaaaagagcgatttatagtcactccccaggaacatgaactacaggggtatggctttcataagtcacacacacacacaaacacacacacacacacacacacacacacacacacacacttaattcccccgagcagcaggtaaacaaggagtgtcgtattttgctgagtgatcttaggtattgaacattacgaagagaagttactctgcctttctttgctttccttacagagaatgatgtcactgcttttcctgtcttggatcaaaaccaggaagagatcattgacaccaatggagctggagatgcatttgttggaggtatggctcgcttccttcacgtttacttctgagttttacgtaattaacccccagtgttctctccatccactactgtcatatccaagattttactacaggaatggtatgtgtttggcaaacatcacttgctactaagttctgcctctgtcatttccataaaagtaattgtgtcagaatattgcataagcaagccacagcaagtgtaatagatatttgattcaggcctaagtgtcacagtgtctgtgcctgagagtggacaggtgtgatacgtacaaagggttaggacttttactaatgaaggctcagtaagaaggagcaaatttggttaggataaagtgacctggggagtaaatattcaaaaacaatattgggacaattaagttttaaagtcaaattactccaagttcagtgtagttaaaccaggctatgtctccagaaagctttaaacaagacaaggctgagaagttttaagcagcagtggggatgactcttgccacgttctcctgaagggtgacttaaatcatgggaaatgcttacatgtgtgcgatgattggagcatagcattgctttgaaggttttatttcattgtaggcatcttttcatccacagagttgtttcctttttctttctctgaatttcttagacccaggctcaagggtataaaacagggaccccacacctcattttctctttcttttacccagtgagcttttatggttctttcttcctacatttatttacttattatgtgtgcatatgttgcactcacgcatgccactgtttgcatgtgaaggtcagagggcaacctttagaagtcatttctgcttcctgggtttaggtggcagtgatccagctgggattctcagacacggcaggacgccacatctcactggctctgtgttctttaggaaagcttgtacaataggcaggatccatttcgtgcttggttttggtgtccttgcacagaaagacttcatcagtgatgatattagagtaatctctagctaattttcccattccatcctcttcagagctgtaaatctttgtaagctaaaaatattttattcagaagtaagccatactgcataatgcattatggaaacagtagtgattttctgactggaaattagttaaaccaggaatcttagtccataagcctgtatacttgtatcctatgaacagtttaactcttcagagcaagatgtgttccatttatctgacattgagtagaacgtataatgaggctgtcataggtacgagggtgacctaattactacagctggccctgcaccaactacagggctactgtcttagtcagggtttctattcctgcacaaacatcaagttggggaggaaagggtttattcagcttacacttccatgttgctgttcatcaccaaaggaagtcaggactggaactcaaacaggtcaggaagcaggagctgatgcagaggccatggagagatgttacttactggcttgcttcccctggcttgctcagcctgctctcttatagaatccaagactaccagcccagagatggtaccacccacaaggggccctccccccctgatcactaattgagaaaaatgccttacagctggatctcatggaggcatttcctcaactgaagctcctttctctgtggtaactccagcttgtgtcaagttgacacaaaaccagccagtacagccatcaatccttggtgagaatggagactgtgtgataaaggagctttacttaggaaccaagctagaaccagctgttcagactgtggtgagagtgatggacaaaccatcccagaaaggtcagcacctctgttagaagatgcgaagcgccgggcggtggtggcgcacgcctttaatcccagcacttgggaggtagaggcaggcggatttctgagtttgaggccaggctggtctacaaagtgagttccaggacagccaagactatacagagaaaccctgtctcgaaaaaaaaaaaataaagaaagaaagaaagaaagaaagaagatgcgaaggctggcattgttgctgttgttttattttaaacatttgtttatgataggaagtgggcatacctgtgccacagactacgtggagaaatcagaagacagcttgtgggaattggttctattgccctcagctcctcaggcttaggagcaagcacctttacctactgcattgtctcagtagaccttaagcctcttttcatagccttgctcatatttattctggggctattgttaggtaaatataaagcaaagaaatttttagggcttctggtttggtttttttttttgttttattttgagacagtatcaagtatgccatactggccttgaactcattatgtagtttgaagtactgatccccctgtgtctccctcctgagtacggagattacaggcgtataccaccatacctgcgctatgggttgcccggagtcaagcacagagctctgggcaagtggtataccaccttcacacagagactctgtaatgacaggccggaaagtgggtaggctaggttttataaattatataccggctatacattaaaaaaaaaagtaacaacactaagactgtaaaatgataatagtaataataactattccgaagttctccagctaaaaagaaaacatctgctgcccagtttgccccagaggctacattctgttcacccctgtgaacaagaacaactttctcaccttattttatttctggctcctagcactggctttcaaaagacaccactaaaataaaagcagaggaagtaaggtgggtacagagccacacccatgtaagttctgcactcaggatgccgaggcaggagctttgcaagcccagggccaacctgggctacatagaagagtcctatataaaagaaaccaaggaaagaggttgaagagctagccaaagaatgaatgctacttgctgctcctccagagcagagcgtctgagttcacttcccaacacccatgttgcactgctcacaactccaggggatccaacttcctcttagctccaagtgcatcttcgcacatcttcacagtgcacagccatccaaataacatcaatagagtgcaggaggacaggaaggcaggctgaagttaacgatatgccactggtaatccctgaattggtaactgtttatcatactataaacctactctggggcttgggatatggcccaagtggtagagcactcaacttgtatgcatgaaacccttggttttatccttaacaccacataaaatagtgactatgcatgcccagaacaccaacacatggcgcggggagccagcatgaggctctcataatgagctcagggccaacagggcagcttgatacaatgtgctatttatttatttatttatttatttatttatttatttattggtttttcgagacagggtttctctgtgtagccctgtcagtcctgaaactcactctgtagaccaggctggcctcgaactcagaaatcctcctgcctctgcctctgcctcccaagtaccgggattaaagacgtgtgcctgcgccgggcgctgtgacacacgcctttatttttgttttggttttacatttacttagtttcagtttgtatgtatattgatggatggcagctgaaaggagatggggtttgtttccaccctgtgggctccaggatcaaactgaggttattgggcttggccccaagcccttgttacctactgatccatctcactggcccctagacctttgtggtttttgaaacagggtcctgatctgtaactcacttgaactcactgtgcggctcaagctagcttcaaacttgcagtcctccaagactggttattttatttaacctgttttcctaatgagagaagtgaggcagagagaaggtggcgagcatgcccatagcctggtggctgcacagtgcaggctcaggctccagccctgctacagtcagtgctctgacgatgacgtcgtttcactgcacagttctagaaacagcatttgagagagggatcttattaaagctgagagccacaggccagcctttctaacaagcaccggtttgctaaagagaatctgaataaaatgacttcatttactgaagagggccttttgttgtctgataggatggatgcagaggactcccgggtaagtttgtgtagggtggaagggctgcatggggagtctgagccaagagcttcttcctgacttacttaagcaagtagttgattgtagcaggagataggcaaagccagatcataaacctacttggaaattatgaagtccaaataggagctgtatgaagcagctgtttaattgcaccaagataagctacctgacaaatctatattaaaacagaatggttttacatcttgaaaataaataaataacccctttggctgaaaccccaggttcccatctcgggatcagcaagagccttcttcctgggattagaaagaaccagctgctaagcccctagctttgacataaatggagagacagtggcgaactttcacattactaagtagattctttttctttgcttcattgcctgattaacatatctcctttttgattgacatattctatctttagacagataatatattcaccctgttactttcaagttttgctggcctaagagtatttctgtcttgtgtggctttgcatatctctattccagtctacagtgttatggtgatttaactctccgaagcacaatcattttcttctcataaatttcaaggtttttgctaaagtatcatcactctagctaccttgtgctaattagatagctcagtaccaaccggccgtgggttccatttagccagttaaaagatgcaagcaagcttacatcatggatcctcatgtgtaatttgtaagcaagtaccctcagttgtacatgaattaaattactagttccatctcaggggcttagtgagtgtgtgagatccctctggccttgacaagcacacctccttgttctatttggagatcttaaacgctttgtaacctctgctcttttatttctccatgatgaaactattcctttcacactcttccttaaaagccccagggtcaggattgcaccttttgaaacagagaaattgtatagtctctaaccatgatttcctaatttcccaggtcaggagaaaatgtcttgttgtcctgctgtgctttgtcacagcaggtctgccttttcatttggaaccctctttgtcactgccatagtaacaaacggaaacattgagaacattttgtgacaggcactgtcattgttcccagtgaaagtctcttcccaataaatgaaactgagaaggataatcctaagaaactgttatgaaaggggagctaaccaccatgctcccacagggcatcagtgccagcctgtgtcactgtcataggatttagtcacaggttttgcaggaaccatgtgtggcccaaacctacacatcatcactagactgaaaggggtacacctgtgacagatgacctctggtcccctctgatgaaagactaggggcatctcccaagaactagcactcttaggttgacacagggaatggccaagagccatttatagtttagaacattgtattttgagagctaaaaacctgtggtacctctgtgagtacttttgatgcttaaaattctcatcatagctttgactgagagaatgtattgtctttttttttttaagatttatttattggttataaataagtacactgtaagtacattgtagctgtcttcagacactccagaagagggagtcagatctcgttacggatggttgtgagccaccatgtggttgctgggatttgaactctggaccttcggaagagcagtcgggtgcttttacccactgagccatctcaccagcctgagaatgtattgtcttaaagggtgcctaattaatatataaaagggccatttagtggccacagtataaataactattctgtttttcatctaataaaattctactgtctaatttgtatttaaaaaatcattttgttttgttttaattatttccagacccaatgagatggttcaatgcaggcagtcacctgccctgggcactgtactctggtcactaggcttagctgccaagcacatttacctgtggcaccatcttcatcctctgtccttaattactacttcatagtgtcatgcaaagaaatgatacacagttcttgtttgtttgtttctagacagggtttctctgtattattagccctggctatcctgaaacttactctgtagaccgggctggcctcgaactcagaaatccacctgcctctgcctcccaagtgctgggattaaaggcgtgagccaccactgcctggctttgatacacagttcttgtggtttggtttactttagttttgttttgttatgtagccactgctaagttgctccttctctagatctatgttgaccattagtcatgtagcagccctaactaagctttgtgggacacccccgccctaagaaaaataaaaagaaaccatggaagtagaagggaggctgtttgggaagaggcaggggatcagcaggagtgggtggaagggtgaatatgatcaggatgctgtatggaattgtcaaaaacaattcacaagagggataaaattaagtgcctacagttatcttttgtatgccaccacattcctttgttttatatttagacaactaaaaagcagtgtgacaggcattcagtatattgtttcctctgaatctgtaagcaagccccgattaaaggctttccttgaagagagttgccgtggtcttggtgtctctttacagcaatagtacactgagtcacacagtgtatgccactcttgtatcatgatggctcataccattttaaacaaattcccagatcattatcatcatggtggggagcatggtggcatgcagacagacatggtgttgtaaaagtagctgagagttctacatcaagatctccaggcagcagaaagacagagcaactgtgtctaacttgagcttttgaaaccccaaagccattcccagtgacattcttgctccaaccatgccatacctcctaatccctctcaggtatcgccactctgatgagcaaacactcaaatacaggcgagtaatctcagcatccgagtggtcaaaggaagaggaccaggagctcagtcaacctcatcagactctaaggctggaggaactgtccaacagaggtcagggccagtttctaactaaggtttatctaaattagtggattttttgtttcatataagaaaagcttcttatatgctattttgataannnnnnnnnnnnnnnnnnnnnnnnnnnnnnnnnnnnnnnnnnnnnnnnnnnnnnnnnnnnnnnnnnnnnnnnnnnnnnnnagagagagagagagagtgagtgtgtgtgtgtgtgtgtgtgtgtgactgcacatccatataggtttctgaagagaccagaagagggcatcagagtccttgaagctggcagttgtgagcaccctgagatggatggtgcgactccaactctagttctctctgaaaacaggccatgcatgccaggtagtggtgacacacacctttaatcccaggactcaggaggcaaaagcagatagatctctgtgagttcaaggccagcctggtctacagagccaattccaggacagccacaaagaaatcctgtctcaaaaaaaaaacaacaaaccaaaacaaactctgtgaacctatgggagttattcccattcaaaccaccacatataccacagctccaattctgtgagccttggtcttcctagatttgaagacagtcaagagatgtttattccaagaaaagtgatgatgttatgaataggctttatttagtggtagatgagcagaggtaacctcctaattaaaatgactaacatgtcttacaatacggcatggcataatgttcacctgttattgtagtacccgtgaactggaactggtttgaatcttaaaatgaacactgcagctgctatcacatgaatctatcaaatttaccatagtctgcctcatccttgcatctgtaataggttctccacaacttagtgagctgaaatgaaaaaatccactgatttagataaaccttagttagaaactggccctgacctctgttggacagttcctccagccttagagtctgatgggattgactgagctcctggtcctcttccttcgaccactcagatgctgagattactcgcctgtgccagcgcacccagttcatgttgctagggatcaagcccagggctttccaaatccccagcccacaatggaggggatttattgctgtcattgttttggttggtttgaggttttgtctttccttccccccatcaaaaccagagctcactgatgagacaggtgttgctagccacattgctccaggcttctctcatctctgccttctgaggctgaagttacaggtaggctgccatacactcctggaattgggaggcggggcctctggggatatgaactcttgcttatacagcaagcactttaaccactaagccatcttcccagctttgtaataggttttaaatcggtcactatccatgtagacagggacaaattaataagtatgtaaagataaatgtattcagttttatttgatgggttatcatgtggtggtcgtctccagctgcctacattcaatttcaagtcttgtcctttctgctgtggaggagttaagttaccttttgctcattgggtgtgttagtagttgtatgggcctaataggtatcttagcagtaaaggcatggcctgttctcagagagaactagagttggagttgcagcatccatctcaggatgctcacaggtacctgaaattccaactccaaggactctgatgccctcttctggtctcttcagaaacctatatggatgtgcagtctcacacacacacacacacacacacacacacacacacacactcactcagcagaggcctaaatcaacctcattcccaacatagcatataagaagcttttctcagttcaggtatatgagatatatattaccccaacctaattaggcagttagtcttttcccttctttttcttttcttcttttttttttttcttttgagacagtctttctatatattctgtctgcctgaaacttacaaatatctactctgcttcccaaatgctggggtttaaggtcagctccatcatgcctcaccaacattaacattttttaaagttcagaatgatgtgtttttatttctggctcatcacttggcaaattaataatttgtcatttagtacatttaagtatttaggatcatcttgctaggaggaatcatcagccataagctactacaatgtataaagtgctataatgagtttccgtgcttatgaattagagcatctgaatgtagacacatctactgtgttataccagcatccatgactttgcttctatagctgatctatacctcagccacagtgggtggctgctgtggctatttctcctcttcttcctcctcatcatctcttttttggtttttcaagacagggtttctctgtgtagtcctggctgtccttgaactcactctgtagaccaggcctcttcatctctttgagtgacgattttgtgaagtccagactgttctaaattcactgggcagcccagaagtagcttgtactcctgatcttcctgcctccgcttgtccagtgcttgaattacaggagcaccaacatactcggcttatggggtcaaaccctgggccttgttcattctggcgagctctcacatccctagggccagggatttgtttttatttcagacatcccacacagcaggtgatagaactaaacaggtatccatttatagccatagtgaagaggaaatgagccccatggaggcactgatattcagtataggcactgaatgttgaagcttcatagctaaggtaaagaccatgtgtatagtatacccttacctctctgtaaatgctttatgatcagcacgtgtgttgtgctgagctgtcacaacaggatgcctgctttcagtccacttcctgtacaggtcagcccttgcaccaatacacacgagttaaacttcggttttcattgtgtaagtacctgccgtgccagacctaaccttggtagacactgtagcttctttttttttttttttaagatttatttatttattatatgtaagtacattgtagctgtcttcagacactccagaagagggagtcagatctccttacggatggttgtcagccaccatgtggttgctgggatttgaactccggacctttggaagagcagtcgggtgctcttacccactgagccatctcaccagccccccaccgtagctttttatgttaattgaacactcagtgtttgttgatttctttttccctgaaaagtttgtcttctaatatacagacaagttacatgaatttatccttagttggtagctgtgttgtagaataaaattctactgactagactgcaaaggaagtaagagaggaagggttacatatgagtgagtattcctcgtgccagggagaccattattttcacatctggatagtctgagctagccaaatagaagaagtaggaatttcctgccagatgttagttctttgagcaacctgtggacatcgcaatgaggggatctaagtcccgctttgctaaagcttacccatgatgcaagctcgctcctaatgggtagcagacattgcatatatgttgccactaaagccaagagtgtttgctattatgaagcgcaggaacatccaaggcctaattttcaaggcacaacatcagtctcatggaaactatttcaaaagtgaacattctattgaaattgcaaaatgtaaatgatgacagtttcattaataaaaggaaggtgagactgtattgccacaagtattccaaataacttgattaaggtcatttaataaagtcagtttaagacagaaatatttctctaaagaagcaatctgaaaagttatgaaaaattgtatttatgtcaatttcctgttcacggttaacaggggacttagaaagtagaatatccttcagagaagctgcacacaaaaagtagaaacactttatccagctgaaacaagaagcattgttgagggaggaaaaagactgcatgtgatctcgctgccactgctgtcctcctctgcaaggggaaatattgacatttaccaggctgtttgctccagctttctgatctcctgcagtttatttttataacaaccttatcgatgggcctcttacccagctctctaggtttaaccgagttgagtcgatttgttaccacggcttcaagtagctgttacagaacaagcaagacaccctaatgaagctgtaaacgtgtttactcaaacagagtattgattttacttggagaggctgatgcttagcgcagcgtcagggtgggtggatttcactgcagtgtttcgttgtcatctgtcagggttctgagacaccaaggaaagccatcagaggataattagaggtagcagaaatttaacccctaaaaatcagttaaccgttgggggtggggtctgtagctaattagcttttattaaaagtttcccctagtagtaataactcagaactttgaatggtgttttcaggtagaacaggatcccaaggttaaatgcatgaatgtaatggctacagatacctttgacttctctcattatggtaattagacccatcagagccaaagccagtcgaggacagagagctgtacatgattttcctggaaagtcagccttatggaattggtaaggcattcagatataattaagacatagctctaaggaagacaaaatgcacgcgccaacttctggagggctctcaagtgttttgtcctgcaccgtgaccacgcgcatgaaagcacccataccgtgttctgtttctttcttttttttaaaagatttatttatttatgtatatgagtacactgtagctgtcttcagacacaccagaagaaggcattggatcccattacggatggttgtgagccaccatgtggttgctgggatttgaactcaggacctctggaagagcagtcagtgctcttaactgctaagccctctctccagccctctcatgttctatttctaaatgtgtttcttctttgtttggggttgggggaacttgttttttgtttttttgtgtgaggtttttggggtttttttagatggtctcattttatggcctaggctgatctggaactaccacacttacctaaatactttcattaaaatagattctaagatatttctgtttgcttttcaagtcgtgtgcgtgtgtacaagagtatgtgcatgtaagccacagggtccgtgtacaggtcataagacagtcttggacagtcgggcccctccttccacttttatgtggggtcccagtattgaatcaggtcagcaggctttggtggcttttaccctgtgagccatctctgaggccttctcattgtaatcttaatgattaaggttaatgcacagcaaaccgaagccgagccatagtaaagcattagcatcaaacctcaggaaaggcatgaacacagcacctgccatcttgcaaatagctagaaaagccttagctgagaggggcccgagcacgtcaacagtgaacagaaaatgaacatgtattcatgataagcttgactgctcagtgtgtcctcccacagctcctctacttcgtccgctgttttacagggaagctcccatgcctccttgcagctcctgcctcagtgaccagtgtaggtgaggagatctagtggaggaccagctctaaggtctgcagtagcagattgtcgaaaggcagcaagaataggttgaactggtactgcgtttatttatgcatgtagtgttccacaccaggctgccctaagttaagtctttaagccatcaagtagcatgttgtaagtttttgttacattaaagggggccacgagggctcacactctttatatgtcaggaggtagagaaggagattggcttctgacagttatgtttatatctcgtcctctagtctatgttaaagtgtttgatgacagaggaaaaaggaagacatgaatttatttttcagaagatgtaatttttttatatgtgcatttcagaatccctgcaatacagtagcttattctgctttcgagagaatgaccgcaggatgaagcgctgagcgctgtgaggtgcagcagtgcggggccgtcacacgttagcttcagggcacttactcttcctgtccagctttgtcaaaagtaacagcagcccatttcatgtcaagaaatgttgagtgggggtgggtgggtatgggggacttttggtatagcattggaaatgtaaatgagctaaatacctaataaaaaatggaaaaaaaaaaaaagaaatgttgaggaaggtaaggaagcgagcccatgagcacaaagactctgtaatcccagcactcgggaggcagaggcaggcggatttctgagttcgaggacaaccagggctatacagagaaaccctgtctggggaaaaaaaaaaaaaagactctgtaacttagaggttaaaacagcagctggagagcgttggctcagtggttaggagcatgtgccactctttctgagaacccagattcaacctcagcacccacacagtgctcataactttctgtaacccaagattcagaagctactatgacctcttttggctccaagagcatccattatgtatgtggtgcggaggacatacatacatgcaggcaaaacacccgtccatttaaaaaagtcagatgaattaatatagttttaaaaagcaataactaaatagatgtttgattttttttttcagccccacttaataaccaccttgtaaaacattttcatttgaaattttccctccaaaattcaagtgttgctagtacaataatattaagaggttgggccttaatggctgaatcgatagatcattaatagaactaaagagggttaggggctatagttgtagctcagtaatacagtgtctcccaagcatgtgtgaggttctgggttcaatccccaaagcggcattatcataataataatagattaaaaagaggctcccacaaagctgtggctctccccctcccccctccttcctctgtgtgaagtaggagacaacccttacctaaccaactagcaacagcttgatctgggactccccatttcttctattaaacaaaatgactattatttatcgacaatctcatctcaggtattcatttataatacaaacaggcaaaaaacaagagtctatggacaaataatttttgagtggtaatttaacatcactaagccccattttttttgcaactatagaaataaagatgagtatctaccttgtttgtgtttttctgaaagtcaaatgaaatgatgtttacaaagcctagtgcctgagccccagagaggattacctgttaacctgttaacctgttaacctgttataagaggaatctccagccagagccagagctggaggtcttcactgaatggaaccagatggaaactgtagacctgggccagcatcaggctgctatgagcacatcctcattagatgaagctattgggtgggcagcttgcatatctgctaacagtctctttcccaccagcctcctggatgactttgcatccatcctggattctagaagagcactgggttatccaccgggttcttaggactgctgtcacaaggtctgcacggaccataagttctttgtccttgcttggtctaacaggtgatgaagttgattggcctgcagagaacttttcactgacctccagtagtggtgctgcgaaggaaggctctataaatagatctatttgcatactttatcatgctttctcttctagatggctttcaagtattccctacaagatgatccgtgttttccctgactgctgcttcctaactgatccacattcactctgtcctatactccactccattttcttatagccaaaataataagtttagagagaaattcagttgtttctctcatggttctatggacagtggctccatattggtttgacacaatggtctaatagaactctgtgaccttcttccctgtctcttcccctaatcttagctgcaagctctgtgtataccgctcttctttctggccttaaatactttgcacaattgaactataaacgggaactcagagtaggtctgtggtgggcatgtgtgatacagaagccactgttccaagcacagcgctctaagaagcatcctaggatgctccaggggcctctgctgaatctctctggtaacattttctctttacttctgccaaaatcgcctaactggaggtcctataatcagagcgcagcagtatgagaccatatcacagcacaaaccttcaaatgctctccttgttgcttggcttgccgtgccttcaataccactgatcttatattgttctccaacatggactttgctctaatgcttccctattttcttctgtatataatgtccatctctcacagcacccaccaaggctctgttcatgacacctcctccaggaatcatttcttgatttcttcggatacagatttttttttctcctgaagcagaataatctaagacactctatattatctatctttgaattctttggtatgtagcccagtacctagatatccagatatacaacctttgcaaaactagagcctttgagttacagtctctcctgctatatggcatcttgggtctggtgtctactggtgcaggagatgagaaggttaagcaggcgggagtatgcaccaaagttgacactaaatggcaggcatctttgtgtttgtttgtttgtttgtttgttttaaagcaagttccccaggcatagtattgtgtacctttaattctaacaccagaactctgtgatcagggacacccacaaccagatacaaaggaaaatcagggaaactcagtagcccagaccagcctggagttcactatgtaacactcagctaccacacccagcttctaaagggcaggtgtctttttttaaaagcaaaagactaaattgacctggaaatgacagagagcaatgtgtgtgtgcgcacatgtagacaggctattgcttgctaaaatatcgtatcgggtttgctttaattgcatggtgatgcctttaagaacaaaggtaattacatgataacttgtgttactgctcccacattatctcttaataactatgtaattaacttgtcactactgtacaatgtgaagtttgatattacttacatataaagagcatcgataacttcagtgaacaagctggagtgaggccagggacagaggcagtgaggaaatcaccacatcagagcagtcaggaaagcaaaggattaattagatcgttggacctgtccagaggactgaaaccaaagccacagccaacagctgcagagctggggttgagtcatgtgaccttctgaagctaccgagcctgcagctgagaggatgctgagaaggttgaggagccgctggggttgggtacagtgcagaggccctgcactctctgctgtttggaagagtttctctttaagtaaacatgggggagagggcttgtttggttgtggtagttgagacaggatcttactatgtcttctaaggtagacttgtccctgcctcagtcttctggtgactaggatcacaagccagcaccactaggcctgaatcaacattaaaaacaataataaagggaaaatcagccagatgaggaggcaggcacctgtaagcccctgggaagaccagggatccaaagctatctcagccagagacagacagacagagtcacacagacagacagacagagacagaaagagacagagagaggcagagacacacagacagatagacagacagagagagacagagagagggagagtcagagtcacacagacagagacagacagagagacagagatacagagagagacagagacagaacatacctaggaccaactagggccatgtgagatactgtctaaaacagagaggaagacatttctcatctcgtttcaccagcatcttgagtttgtgtgtgtgtcatacatggcaaagatgtgcagccccagaaactctgattcactgctggtgaaaatgaaaactaggatggccacttgggaatacagtctggcagttccttacacactacacatatgcttaccatatgatccagcaattgtgttccttggctgcccaaatgagctgaaaacttatgtctgcacaaaaacctgtacacaaatgtgtatagcagttttacccataaatgacaagactaagaagcaaccagcatgctcttcagcctgtaggtaaatgagtacgcaagccatggtctatgctactcaatatgaccaagccagtaagaggtggtaaatggggctgcagtgataagtcactggttaagagcactggacactcttgcataggacccaagtttgatggcacttcacaaccctccatgattcctggaccaggggatctgattccctcttccggcctccaagggcaccaggcacatggcaaataactatacacacgggcaataacacggtacacataaaaataaattttccaaaagaagaaataagtgaatggggctgacaaagtggctcactgtgtaaaggtgcctgccgtggggcctctgagttcaatacccagatccatatggtccaaggggagaactgactccagcaaattgtcctctaacctccacatactcgccatggcacaacacacttaatgtaaaaaaatatatttgtaaagtagtcagttttatgttacatatatttttcaaggtgcaggcatcttagaagcttggtatggtgcacatgccttcaatcccagcgctagggaggcagaagtaagtggatcacactgagttggaggccagcctgctctacataggttgttccaaaccagccagagctacacagtaaggcccaatctgagggctgggaggggggcgcttaggctgttaattcattcacattataaaggaattccctctcatttttaaatataaatatgaacattaggtaaatttatacattctttatgattaataaagactacttcgtgaaggccccacctctaattgattatgcactatctgtagttcatctttgctaggttttaagaatagattattgaaaagctgagactctgcagggtccaaaggtcttcgcttttgttggcatccaggttttccttgtcagagtaaatgggacttcagtgcacagccacgcatccgtcagctggctctcctctcagaaggagggtgccagcacttagcctcacagaatgttccacaacatgagcttttctcacaaagatcatggcaggaagaatgaggaaaacagatgttgctcataagggttctaatagatgtgtttccattgtaagctgatcgcactctgaacctggcgtctgccccattcgctgtgtgggctgaacatttcagtctcagagtttggcagaaagtttatactgacctttgcctgttacctgtaaaccgtgaaaaaaaatactcttgagagaatgagttcacattcttccaaaggcatcattctattagccaaattaattctcttctgtaattgggcaaacattttatcacctacggagcatttcccaggcctggccagggaaaagaggaagggcatcaatctggtgtgctctctgcaggccgtggtagcccagcttcacattaacctccagctccaccctgcaccctaggctgcctgggcctcagggaaggccggaagtccactagcacaacagtttctcattatcctgtcctgaatatttgagctcagagacagctcaggttccccagaggcagtagcacgggtttttctggttttgatctatcttattagtgactacacctttttcctcccttccttccttccttccttcnnnnnnnnnnnnnnnnnnnncctccctccccccttaccctcccctttcctcccctcctctcccctcccctccccaccccttcccatcccttcccttctttcctgtccttccttcccgtcctgtcctttctctcctttcttctgtgttaaagttctgttttataaactttgacatgcagtgtgcccttcactgtgggcacacccaccatcccatgcctgtccagaactctttcctgcccccactcagacattcggatttcctcccctggaaactgtcagacacagcaaggctgctgtgagcactcatttacaagtccaggcgcatctgcattcatttaccctgagcaaacatctggagataggatgactgaggcatagagtaggtaaatttaacgttttcagacaatatttgtttctattttgtatgtatgagtgcttgccggcacctatgtctgtgcaccacacatgtgcttagtgccctagaaggccagaagagggcattggagcccttggagctagagttaacaaacagttacaagttgccatgtgggtgctgggaatggaaccatggtcttctggaagaacagaaaacttgcatttttaaccactacgccatccatctctccagccccaaagttaactttttcaggcactgatgaatttccaaagtggtcttatcattttacattccgagggctggtaagatggttcactgggtcaaggcacttgcttagcaagcctgacaacttgcactcagtccctaaactcaaagatggaaggaaagaaccaactccacaggttgtcctcagaggcccccgtgtgcccgcacaggtcatacactcaagcaatgataataactgaagcctccttaacattccctaagccagagtgctcaaggtctggaggatgcacacccttgccctggctccgtgcagatcgtcttgctgatgttgccttagcgagtggcagccacattactgcgattcccagctgcatgcctttaatggattatggtgctactacaccctatgtgaatttggcatgtttccctttgcaggttttgtttgtttttgttttgtttgttattgagttacttcttaaacaaagcaattttaatgaagtccaaattattctgtcttctgtgaaagactttacttaggggctagggggtcatcacagcggcagaggacttctgaagttggtgtcagtagaccaaagtcaaagatttctcagatgccatagtcttagttttgtttagctttggggttgattggttggcttttgtttgcagtgctggggaaatgaacatggggcctctcacaggatggccccgtgctgccgctgagctgtgtgcccagccctccaccccctgggttgttgttttttgtttgtttgtttttattctattttggttttttgaggaagagtcttctgataatacccagacagaccttgaatttacacaggccccctgtctcagcctccctagtagctgggcttacatacatccaagttttaaaggcgtcttgtcagctgttggttggtacttcaccaagtcactgtgaggcctcgaccggctggcacacactctcccgggtatccaggtttctctgcttttccttcatgctgtcttggcatttccagtggctggtcctacagggctttctcagatatattccgtatttcacgtgcttgatactatgagtaagtagcatctcgaatattacttttgaattgctcactagtagatataattgctgcgtgtgtgctagtggagcccttcacatgagctatcagttgagatcctcccgctttgctaaagttgtacgagtcacagcttcctaatcccataggactcttagactcagttgcatatgtgcatgtggggttgttagtgttattgtttcagtttttgaggcagttttctgtcccccaagcaggcctcaaacttcagagtggctcccaagtgctgggattaaaggatgtgctgccctgatgtgctaggaatccggctgacagcagtgttgatgctgtagagtgcttctctgcgtctctgcttcaacccaccagatggacatgacattttctaactctttttgagtggtgtggtgagataagctctcaccgtgtagccctgttgtctagaactccctatgtagaccaggctgacctcagactcacagaggaccaccgacctgcctcttcttcctgactgctgggcttaacggtatgcagcaccactcttggccttgcctgttttgagtcacaggcatggaaggtcttgcctccttcagagactgacagggacttcctttcccagcagctcactctgctccagcaaagtctccatgagagctctgcagagcacgtgggcttgggctcggcaggtggtgccaacctgtgagtctagtgggggggggggtaggaagaggtagagtcgggggaggaaggccaccctgagctacatcttgaagcctgccagaaagggggtgcggacaaacattcttgcttcatgtctagtctcaaggaaaaaatgaaattcatcattcaccttacagtattagcagtgaatttttataaatttctttttcatgtggaaaaattcccttctgttccctattaaaattcggaatagatgttgccaaatgttttttctgtatgtattagaatgctctaaggtcttcatacttggtgtaacatattatgtcaatatccaaaaatactaatccaaccttgagagcttgagataacactactttatcataggttttattatatgccatagcgtctgtatggaggttagagaacaactttcaggagtcaattctaccttccataatggggtcagggacttgaatgcaggttatcaggcgttcatggcaaagcacttttattagagaagccatctgattggctgtactatcttgttaggagaccagggattgggacgggttctcactatgcggccatagctagcctggagctcactatgctgtcctcagactcacagattccatctgtctctccctgagtgctgggatgaggtgtttctcagcacaccaggcttctgctttttattttcactagctttgtttgtttgtttgttttgtttttatgcgtatgttttgcctgcctatatacaagtgcatcacacagaggccaaaagagggcgctagatcttctggactgcagggtttgtgagccactgtgtaggtgctgggaactaaactctggactttgtaaggccagcaagtgctcttaacctcagagctacctccccagcaccctgttgtcttttgtaatgctctgtttggtttgatttgctcagatttccttcagaacatttccatcttttctgaatattgtccctgtattggtaaggagcattgcttgtcagagaaagcctggtgtcaggattaaagtacaaagcatttccttcttttagttttctggagaatctctccagcattggtatcctcctcttcttcctcctcttcttcctcctcctcctccttcttcttctttgttgttgttgttgtgttgttttgtttgtttgtttgtttgtttgtttgtttttcgagacagggtttctctgtatagccctggctgtcctgggactcactctgtagaccaggctggcctcgaactcagaaatccacctgcctctgcctcccaagtgctgggattaaaggcatgcaccaccacgcctggcagtattgttcttcttaaccattcagtggcattcaccagtgacaccatctgcctgcccgtggcctttggtaagaaacagttcagtgtagttctaagcactgacactaagaacagaaggaagtttgggaccgaggcacacctgaggtgggcctgggtttctgcacgaaaaatgctctgagatattctctgtaagaagctctttctgagacagggtcttgttatatagttctgctgccctggacatcagagacctgcctgtctctgcctggggtcacaggtgcctcaccccagccgtaatttttatttacagtggctgcaatcgagttaagtgagctttgacaacctgcgtactcaaaaagtgcctggttcacccgatgtggcaggtctgagatctgtggcttacattgtttatagtgcttcctaattatcccctcacatgtgcaccatccatggcgacatggtcactcctcctgatttatactgtcctcttctctctccatctgccttgtcagtctagctagaaacgtatttgtttcagcctcctcttattcgctgtctgtcttctcagccccgtgacggcagacaggcctgggttgtccaccttgtgtgtgacttgatgaccatgcattgccaagtggagtcaattctatttctcctcatttgttcttctctttgtggctgatgtatatttgactagtttggtttcatatcatttgcctttatttcaacggtttgtagaaggaaaacaaacctgactccttttatcccatccttcactgtctgcagtgcagtttctgcattggctttctgttactgtcacactgatttgcagagactagctgcactccagtgctacctctggaaagaacaccttcgtgtatctctctctctctgtgtgtttctctgtctgtctgtctgtctctctctctctctcccagattttgttggtttttttttaacagactctcccatagctcaggcaggcctgcattctttgtggaacttaggatgcctgcgatcctgactctcccgtctttgcctcccaatgctggggttgcaggtgcccactggcacaccgacagcacactgcgtctctctgatgagatggtagggttgtcttgaaatagcattgtagtaggaatatcaacacagaagcagtccacaaggacggatggggagaattaaaccagtctccctgtgatccgtttcagtggcgctttagaccctccctgtgagtgtgtgtgttgtgtatctcaaacttcattactctaacacagagtttcaatgaggacaggtttgtttctcacacttgcagaggtggcagtagaccaaagctgcctcctaggtggtgccgcccacaggcaggcaagcgttgctcccacagttacaacatgcttatgccaactcagagacgaattctgccggtgccctaggagcatctccatccatcaagttgacagtcaagattgaccatggtggtgacacttagagatcagagtcactgggccacagctgagcgcttggcactgctaagcttttacccagcactcacactctttcttctgtctgttccaggctttctgtctcaactggtctctgacaagcctctgactgagtgcattcgcgctggccactacgcagcaagcgtcatcattagacgaactggctgtacctttcccgagaagccagacttccactgatggaagaaagaaaactcaggctgtggagtggagactgcagtgaccacatcctgagcgttcctccataagaaagaatagagttatcctctgtctttgcccaccatggttctcattagtaacttagagggctcagtgctacttctaggacctttagtctctgaaatctgggaaaaatgtttatttgcatagtttgttagtgcctcttaaatgtcaaacaggaatacatttcagtagaaactttaatttcattttcaattgtttgtaaattcatcagtatttagtaaattgatcttttttttatatttctgcttccaatgcaggtgcaatttaatataatagactttttaaagaaattaatgctaacatcattcttgagctttttatataaatatatttaatttggaagcgtgtgtgtgcacatgtcatatatatatacctgataattgtcagataaggcacagaaatgttcatcacaccaattattccttataagctcttccatgtgcttcagacatctgatggacttggggcagctgcctaacccgcaacatttgcattatgttcagactgtaacctgcttactgatggtactctataatttgatacaaataaaaaaattgccatatagggattttttttctgtcttgcttgtgctcaataaggaagaaagagtgttatttagtactgggccctatgtgattttattgatggggtgaggtaaaaatatagaacattatacataaatatacataatatatacatacacatacaataacattataagcaaccagttagcactctttttgtgtgtgtgttttcatttcttccaggtagacagtaagagtggaattactagatcatatgtaaactttgtttgtttgggataagatcccactgtgtagctctgtctggcctggaattctctgtgtagatcagggtggcctcccactcccagagatccacttgcctttgccccatccttgatcatgtgtaacctttacaaggaacttaaaaaaaaatccaaaatagctggctgtggtgtaatcctagcatttagaacactgaagcagataagcaccaggccgtccaggtgatctcagggctagcctgggctacctcacaaaacaaagcatgtttttgcactaccttcagaatgtgttacagttccagcttcacatccttagtccagcacttgcctgtctccgaggtcacagacagactactgaagggggttcatgggtttgcttgtgtaggggtgcaggtgtcagtgtgagtgtgcctataaataaattcaggtgcaagcatacgtatgtgggggccagacgccaacctcagatgcccttcgtgggcgtctcctttgtttgtcgaggcaggatttcttctcagcctggaacttgattagactgggctgggcagcaagtcccaggatctacctgtctctgtttgcgcctccgcgacactggggttccaagcatacaccactattccggcttttataagggactcctcatctacgctgcctctctgcggaccaagcttccagcaggtgaacaggtcagagaggccatggtgtggtcgcagggcatctggtagggctgtctgacttgtgtttctgtaatcgctgtacccttgggattcctcctggcagcacacaaggtttgcagtgaccccacatcctcacctgccgacacttgtcactctgcattgtttgcccctgtgacagtggggatggatagttctgacttgacttccctcattgtccatcagtgctgtgcatctctctctctccatctgctgtcagctctgggcgctactcatcctatttgttgtgctttcagatcttttctgatttgcaagtgaacaatttctcttaataagttgtactttcaatatattttgtatgaaattccaccatgtgatgtactagtattttctcccaccacatagattatcttttctgtttctagaggtgttctacccagttttgggattttgttgttttttttttttatgttgttgttgttttgtttgtttgttttttattgttacttgtggccctggtatcatgtctaagaagccagtgctgaacccaagtcagaatatttacttctgccttttatccaaagggctaagggctgctcttccagaggactcccgtttcagttcccagcattcacacggcatctcacactgtctgtaactccagtcccagggatccagtgtcgtcgtcttctctccatggatcaatcctgcccacgtttggtgcacagacctatgtgcaggcaaaacacacatacacataaaatgatacaatacattttttaaggaagagtttgtgagagcttaggtatatggttatcatttctcttcagagaccctggcttggtgcaagaaacgagcctagtctacatagcgagttctaagccagccaggactatatgagatcttatgtgtagatattatgtatatgtggacattatatatgtgtgagaggtttttgaggctgtggtttttaaaaccatcacacttttacctgtgcttcggcagcacacataccaagatactgagaagaatcacatgatccctgtacaaggatgatgcacattcataaaggattccatatgaataaatatattattaaatgtaaatgcatgcatataatttcctttgctaggcaacattgcgattctgtaaagctgctcccatatcccaaggactttcaaacctcagtgtcttcaccttgagggccttcctgtgaccgccaggctgctattccctgctctgtccatgtgcatcccagtttccatcctgtctgatcgggaccatacacacaaagccagcttctaagcaagtgccacttactggtgtgtcagaacatacccgtctcaagtcttaaatccagcagatgactgtaactgaccctgatcatagtttatggttgtccatcgaagtttagggtgtaatgatgtctgcagtttattttcttcaaaaagacaaatctgtctcccactctgcttcacagggaaggatgacactggactgtcctgtagctctgaaggctttctagttccacagggatgcctgggccccaatccctgcagcctgtatgtgtggcatagcttcaggcatactgcagatgtactgaaggttcaatcataatataatactctactggaatatctagggagccttgggctagtcatgggagcctatgaaagcagagagctttctgtgactggaagcagcagagaagggcaggagagatccgagcagtcgaagctcaagaaggacccaagataccactaatgagagggtggggccacagtcaaacctacagccctcccactgcagagctcttactgtgaaacagtttgtttggaagtctttccccagagcctcttagggagcagagccacactgagagctgggggcagctttctgaaatccctatacagtatacaggtggccttctgccaccagcaacagaaaagccaacaggtgatcgatctcttaataaagaccagagaccccttatgatagcacacacctgtgatcccagcaggaggctctcaaattcaaggtttgggttacacctacagagtatggagggagggaggaaaggagggaggcatgagaaggaggaagaaagagaattttatatttatttattctgtcttacctggctagcttgggactcagtgtataccagggtagttttgaactcagagatttgcctgtctcccaagtgctaggattaaggaggcatgctaccaagtctggtctgttttgacgttttgtgatatgtggggtgcaagtgtgcccccacatgcacacggaagtcagaggacaacctgtgggaggcctcttctgccctctgcgtgcaccagccgtgaatgtggtacacagacatccattcacataacataaagtggaaaggagcttaggagacacagctcagcagtcagtgtgtgctctgagctcaggtcccagaaagtgttttaaatttctatgccatctctcctgtccctattaataaaacagaataaaataaaataaaataaaataaaatggccaggcagtggtagtacacgcctttaatcccagcccttgggaggcagaggcaggcggatttctaagttcaaggccagcctgctctacagagtgagttccaggacagccagggctacacagagaaaccctgtctcgaaaaaattaaattaaattaaattttaaaaaaagaagctcctgacttcaaggaatgctagtgttctgcggagcactgagctgtgcacaggcagcctggtctccggttgagcacaggctttgaaccccagacacccgacaggtgattggccacgctccttagtcgtcgtccccctcctgtagcagctacagcctcccaagccccccaccccctgcagagaggtatgtgggcatcaatcacatagagcaacgccccaagctcctggtattgtctggactccacccccacagttacctggcaatagccaggtaggcttctccccacagttacttggcaacagccaggtaggcccaacccagtataaaaggggctgcttgcctcctcctcctccctcttactctcttattcttgcctctcccttgcttccccctatctccatatggttatggcagcctctacttctctctctccctctctttgcctttctctgcctctactctatgacaataaatgccttaaaaacatgggctgtctcttctcatgaggatctgctgtgctggagcaatggaccaggtctccctctaaagaactgcatctaatctcccacaggaggcctccccgtgttctcagccatggctgccagccaagcaagccacccgcctgaccaagccaaggactcccctgagaaccagcaggagcgctctcctcctgccctttccctttagccttggggaccccctccattcccagctcttctgcagcattcagcggcatctgtggtccccaagaacctgagaacctgtcattctcagcctccatgtaggccaggggacccagagccaattccagcagttcctcggggacctcagactgtgcctccccacccctggagcagggtcctgcagcttctcacagcctgacacctgccccgcagctgcgtggggtgcagtcagacttcccacgtccagtggcccgagctcgatgcaggacaccaattttaacccacagtgtttctctgtctctggacttctagcttgtgatcagtcgattccattcaatgggggctggcgagatgggtcagcaagtaagaacactgactgctcttccaaaggtcctgagttcaaatcccaacaaccacatggtggttcacaaccacccataatgagatttgacaccctcttctggtgtatctgaagacagctacacagtatacttatgtataataataaaaaacctttaaaaaataatgttatagtttgaatatgaaatgcctcacacacaggctcatgtgtccttacctaatgttcctattttggaaggttctggagatgggaagtaaagcctacccagagaaggtaggtcagagtgatgccatgttcttcagtcttatctctgagcttcctatctgctgtgagcttcgaggtctgcccctcggcaggtctagcccaccgtcctgtttaggcttgctgtgaccctggactcagtggagccaaagaccatggactgacacctcgaaagatacgggcatcaaaacagctcttcctcttctcaggagcaactaatacacatgaagttctacggtcaggcactttccggctgaaggtggtgaggaagacccctcggggggtccacggtgtaaggagcaccatctcattgccagccgtaagaagacaggtggagcactgtgtgcctgtgtgaaggtcctcagcacacagccatatcctcgcccagggctctgggctccaccattgttctaacccagtaaaaggatgctgagtaagtcacctgacagagtcgccacatttcttgtcccataagggctgggttgctccagagagggggcatcttgctgtaagaacaaaggctacatgttatgaaagacaaatgcagaaagtctacccagttgccaagttcctcacatgacttagagatattatgactaagtattattgtctcccaggccttgtttatccactgtgtgaattgtttgctctcattggctaagagccagctaaatcagtgtcatggagaacccagtgctatccaaactgttgccgtgtctacctgatgacctgtcatgagaagatgctgttgggagcagaggtcctggaggggttctgtgggaaagagcaactgcttgctatacaagcaggaagacctgagttcaatcccccaccatctgggtaaaagtccagggtagagaatggagagctggcccagcagtcaagagtatatattgctcttacagagaatccaagttctagtctcagttctcacatcagggggttgttgatacccctgtcctatgcagacaccagtacttacatgcaccaccccaacacacatatacataattaaaagtagaaacaaggccaacgcctttaatcccagcactcaggcggatttctgagttcgaggccagcctggtctacagagtgagtccaggacagccaaggctacacagagaaaccctgcctggaaaaaacaaacaaacaaaaaaaaccaacaacaacaacaacaaaaatgaaaaggccaggtccactacacatacctataacctcctcactgggtcatggatggagacaggagactgtcagtgctttctgccatcagtctagctccagatacagtgagagcccagcatcaaggcataaagtggagagtgatggagcaggatgcacactgtcctcctctgcctcagcacacagacacccacacacatagatgatgctgttagggttcccagctcaaaagctcccctgcccaccaaggccaagtcaataccaatacagagaaaccctccaatctggtgggatttgttcctgatgccaaccacaggtttgcagcgcaagtttcaacaacatgcaaactcctggtaagtaactgttgcattaggaccaggctttaagagccaaaggagtaaacacaattgttgtgaacagaacacaaaggccgtgtacagctgagacagtaagagtttcctgtgggcagcacgggctggagacgttccccctgagtgtgaacgctgtgaaaacccatctgaacaacagtgctcacagctatgcagtgccagacaatcacaccattgaaagacaaggctgtgagtgctgcagattcccagggattattctaagttttaggagtagggtactgctaggcagtggtggcgcatgcctttaatcccagcacttgggaggcagaggcaggcggatttctgagttcgaagccagcctggtctacacagtgagttccaggacagccaggactacacagagaaaccctgtctcaaaaaaaacaaaaaacaaaaacaaaacaaacaaaaaaaaaacaaaaaaaaaaacaaaacaaaaccaaaaaacaaacaaaaaaagaagtagggtgttttgtccagctcccctctatgtaagtgaataccttttcttccaggagtccaagctcctgccctcagcctctcgctgcttagccctatcagcagttgggaaaccaaggcagaggggactggctacagatgggcaccatccaggagggtatgtctctctctagaacgtgctatttggtcccaagaccctcactcacaatgaactcggggtagttgaggctacagtttctctggaaagcaatggatccatctgaaacaagactctagggctggggatataactcagttggtagtgtttgcccagcacacacaaagcaccacttcctgttgaccttcagcaccacacaaggctggcacatgcctgttaattgcagtccttgcaggagatagaagcagagggtcagaaattcaaaactctccttggatgcacagtgagttcgaggccagcctaaggcacatatgagctttcctcggggaaaagggatttggaaagaaatggtgtttggtagatctctgttgatcaccatcagtcttatttcctttctgtttgctgtgacagaacaccctgaccaggcagcccagggaagaaacaggttacttttagtttacagttccaggtcaaagtccattatggttaggaaggcaaggaggcaggaacttaaagcagcgatcacatgatttcccacagtcaagcaaagagaaatgaatgcccacaggcctgtgctctgctcttacgcaaagctagggaatagtgccccccacggtgggcagagctttccccttcaaataagatcatcaaaaaagtcccagaaagattggccaacccaatctagacaatccctcactgaggctctctcctgagtgagtctagatggtgaagttgagtcttgatggtaaagctatcaagtttgcctcacacttcataaacattctcttctacacagcgtgattgtcctcatttgacacaagcttcacgtgagcgcaggaacattgagcaaattgctttaatccacacagttccaggaagtgggggtcaggaaagagagccctagctgtctttcctattctactagggaatgtcacctcctgggtaccttgattacagcctccaagactagggaagccttgctaacccagcagtgacagatcccttcagggcacagaattcctggcctgctgtgactccctgtagctgatagactgtatatgctgactgtcagggccaaccacaccatgaccttggagtctgaacagaatgtcatttcagaatgtcataatggccctgatgagacaggagagcctgtgtttggagatggtgcctcatgctctctcacaaagtgcttcctctaaggcttctagaaatggagacaggggatggaaggctccaaagagacctgaagtcccttttgtgctcacgcattctctgcctctttgccaagtcatcctgtccaggcttgttcaccccggagtcgcagattcatcctttacctcctcggcagctggtcttttagggacaactctgggtaacttcctcccactgttgcagtctctttcctctcagtctcttgcctgaggaattaagcactctgcttcctggaaggctacacagtacacctgcagtcctcaacatgggggccactgagacttcaactagtgtagcctacaactgtagcagattggtttagaatttgtcggttggtttgtcttgtgagccctatgaagtagcccaggctggacttgaactcactgtgtagcccagattagcctcaaactcaggctaacgcccacctcagcctcctcagtgctcgaatgagaggcatgttctgtcatgcaccttgttggttcttctccagcgctagagaacccagcacacagggccttgccaagcaggctctctaccactgagccccaacctcagcctgccacaggtttgttaggggttttccttgttttgacacattactggaggtgatgtatacctaccagccagcactcgggaggctgactcagggggactgctactagtttgtggggaagcaggactctacctcaaaaaaacaaaaaaaaatcgggcagtggtggcacatgcctttgatcccagcacttgggaggcagacagatttttgagtttgaggccagcctggtctacagagtgagttccaggatagccagggctacacagagaaaccctgtctcaaaaaaccaaaaaccaaaacaaaacaaaaaaacaacaacaaaaaaaaacctatatatataaattaatacctataacactgtagatacatatcaaggttttattggttgaaatgtcagtgtttgcttttgctttttgagatgttgtctttccaaataggaggctgagttcatactcagtatgtcttccttttctccttctttcccttccattcccccctccccgtttcctctccagtatacagctgtcaagttgtatctgtgtgcattaatgagcaattacaaaaccttatagtgaggtggtcagctcaaaagccccactgcccactaaggctgaatcaatgccaatgcagagaaaccctccactctggtggggttcattcctaacgccgggcacagctttgcaaactgctgacaagcaattgcttcatcaggactgggccaaaggagtaaaccccattgtccacgtgaacaaaatgcaggggctgtgtatagagcagacattgagaggttcctgttggatgctcaccagatgtccgtctgggactccagctttcagggaccatcagccaagggatccagtgttcctcctatgtggttcttagagggataacacagttacagctagatctccgaatgactagcctctctgaggagatctgcaatttcttatcttttcttatttgtgggtctgttggggttgacaagatggctattcagatgctagccatacaaacacaagggcttgagctttacctccagcagccacagaaaacatctggcatgcacaaggcatggtggcaggaacctttaattccagcactttaatcccaggcagaggcacgcagatctctgt

SEQ ID NO: 390 - DNA, 1753 bp, Mus musculus
gcgcggcagagccaaactacggtgagagtgtgaagatggcagctgcggacgagcccaagcccaaaaagctcaaggtggaagcgccacaagcgctgagtgaaaatgtgctatttggaatggggaatcctcttcttgacatctctgctgtagtagacaaagatttccttgataagtattctctgaaaccaaatgaccagatcttggctgaagacaagcacaaggaactgtttgatgaacttgtgaaaaaattcaaagttgaatatcatgctggtggctctacgcagaattcaatgaaagtggctcagtggttgattcaggagccacacaaagcagcaacattctttggatgcattgggatagataagtttggggagatcctgaagcgtaaggctgctgacgcacatgtggatgctcattactatgagcagaacgagcagccaacaggaacttgtgctgcgtgtatcactggtggcaacaggtccctcgttgctaaccttgctgccgccaattgttacaagaaagagaagcaccttgacctggagcggaactgggtgttggtagagaaagccagagtttactacatagctggcttttttctcacagtctccccagagtcggtattgaaagtggctcgctatgctgccgagaacaacagggtcttcactttgaacctgtctgcaccgttcattagccagttcttcaaggaagccttgatggacgtcatgccttatgttgatatcctctttggaaatgagacggaagctgccacttttgctagagagcaaggctttgagactaaagacattaaagaaatagccaaaaaggcgcaggctcttccaaaggtgaactcgaagaggcagaggaccgtgatcttcacacaagggcgagatgacaccatagtggctgcagagaatgatgtcactgcttttcctgtcttggatcaaaaccaggaagagatcattgacaccaatggagctggagatgcatttgttggaggctttctgtctcaactggtctctgacaagcctctgactgagtgcattcgcgctggccactacgcagcaagcgtcatcattagacgaactggctgtacctttcccgagaagccagacttccactgatggaagaaagaaaactcaggctgtggagtggagactgcagtgaccacatcctgagcgttcctccataagaaagaatagagttatcctctgtctttgcccaccatggttctcattagtaacttagagggctcagtgctacttctaggacctttagtctctgaaatctgggaaaaatgtttatttgcatagtttgttagtgcctcttaaatgtcaaacaggaatacatttcagtagaaactttaatttcattttcaattgtttgtaaattcatcagtatttagtaaattgatcttttttttatatttctgcttccaatgcaggtgcaatttaatataatagactttttaaagaaattaatgctaacatcattcttgagctttttatataaatatatttaatttggaagcgtgtgtgtgcacatgtcatatatatatacctgataattgtcagataaggcacagaaatgttcatcacaccaattattccttataagctcttccatgtgcttcagacatctgatggacttggggcagctgcctaacccgcaacatttgcattatgttcagactgtaacctgcttactgatggtactctataatttgatacaaataaaaaaattgccatatagggat

SEQ ID NO: 391 - protein, 361 aa, Mus musculus
MAAADEPKPKKLKVEAPQALSENVLFGMGNPLLDISAVVDKDFLDKYSLKPNDQILAEDKHKELFDELVKKFKVEYHAGGSTQNSMKVAQWLIQEPHKAATFFGCIGIDKFGEILKRKAADAHVDAHYYEQNEQPTGTCAACITGGNRSLVANLAAANCYKKEKHLDLERNWVLVEKARVYYIAGFFLTVSPESVLKVARYAAENNRVFTLNLSAPFISQFFKEALMDVMPYVDILFGNETEAATFAREQGFETKDIKEIAKKAQALPKVNSKRQRTVIFTQGRDDTIVAAENDVTAFPVLDQNQEEIIDTNGAGDAFVGGFLSQLVSDKPLTECIRAGHYAASVIIRRTGCTFPEKPDFH

SEQ ID NO: 392 - DNA, 1686 bp, Mus musculus
actacggtgagagtgtgaagatggcagctgcggacgagcccaagcccaaaaagctcaaggtggaagcgccacaagcgctgagtgaaaatgtgctatttggaatggggaatcctcttcttgacatctctgctgtagtagacaaagatttccttgataagtattctctgaaaccaaatgaccagatcttggctgaagacaagcacaaggaactgtttgatgaacttgtgaaaaaattcaaagttgaatatcatgctggtggctctacgcagaattcaatgaaagtggctcagtggttgattcaggagccacacaaagcagcaacattctttggatgcattgggatagataagtttggggagatcctgaagcgtaaggctgctgacgcacatgtggatgctcattactatgagcagaacgagcagccaacaggaacttgtgctgcgtgtatcactggtggcaacaggtccctcgttgctaaccttgctgccgccaattgttacaagaaagagaagcaccttgacctggagcggaactgggtgttggtagagaaagccagagtttactacatagctggcttttttctcacagtctccccagagtcggtattgaaagtggctcgctatgctgccgagaacaacagggtcttcactttgaacctgtctgcaccgttcattagccagttcttcaaggaagccttgatggacgtcatgccttatgttgatatcctctttggaaatgagacgactaaagacattaaagaaatagccaaaaaggcgcaggctcttccaaaggtgaactcgaagaggcagaggaccgtgatcttcacacaagggcgagatgacaccatagtggctgcagagaatgatgtcactgcttttcctgtcttggatcaaaaccaggaagagatcattgacaccaatggagctggagatgcatttgttggaggctttctgtctcaactggtctctgacaagcctctgactgagtgcattcgcgctggccactacgcagcaagcgtcatcattagacgaactggctgtacctttcccgagaagccagacttccactgatggaagaaagaaaactcaggctgtggagtggagactgcagtgaccacatcctgagcgttcctccataagaaagaatagagttatcctctgtctttgcccaccatggttctcattagtaacttagagggctcagtgctacttctaggacctttagtctctgaaatctgggaaaaatgtttatttgcatagtttgttagtgcctcttaaatgtcaaacaggaatacatttcagtagaaactttaatttcattttcaattgtttgtaaattcatcagtatttagtaaattgatcttttttttatatttctgcttccaatgcaggtgcaatttaatataatagactttttaaagaaattaatgctaacatcattcttgagctttttatataaatatatttaatttggaagcgtgtgtgtgcacatgtcatatatatatacctgataattgtcagataaggcacagaaatgttcatcacaccaattattccttataagctcttccatgtgcttcagacatctgatggacttggggcagctgcctaacccgcaacatttgcattatgttcagactgtaacctgcttactgatggtactctataatttgatacaaataaaaaa

SEQ ID NO: 393 - protein, 349 aa, Mus musculus
MAAADEPKPKKLKVEAPQALSENVLFGMGNPLLDISAVVDKDFLDKYSLKPNDQILAEDKHKELFDELVKKFKVEYHAGGSTQNSMKVAQWLIQEPHKAATFFGCIGIDKFGEILKRKAADAHVDAHYYEQNEQPTGTCAACITGGNRSLVANLAAANCYKKEKHLDLERNWVLVEKARVYYIAGFFLTVSPESVLKVARYAAENNRVFTLNLSAPFISQFFKEALMDVMPYVDILFGNETTKDIKEIAKKAQALPKVNSKRQRTVIFTQGRDDTIVAAENDVTAFPVLDQNQEEIIDTNGAGDAFVGGFLSQLVSDKPLTECIRAGHYAASVIIRRTGCTFPEKPDFH
